(19) United States
(12) Patent Application Publication
(10) Pub. No.: US 2007/0196334 A1
(43) Pub. Date: Aug. 23, 2007

(54) Modified vectors for organelle transfection

(75) Inventor: Shaharyar Khan, North Garden, VA (US)

Correspondence Address: PATREA L. PABST;PABST PATENT GROUP LLP, 400 COLONY SQUARE, SUITE 1200, 1201 PEACHTREE STREET, ATLANTA, GA, 30361, US

(73) Assignees: Shaharyar Khan; Gencia Corporation

(21) Appl. No.: 10/561,829

(22) PCT Filed: Jun. 25, 2004
(86) PCT No.: PCT/US04/20454

§ 371 Date: Mar. 23, 2007

Related U.S. Application Data
(60) Provisional application No. 60/482,603, filed on Jun. 25, 2003.

(51) Int. Cl. A61K 48/00; C12N 9/22; C12N 15/86; C12N 15/74; C12N 5/10

(52) U.S. Cl. 424/93.2; 435/456; 435/472; 435/199; 435/252.3; 435/325; 977/802

(57) ABSTRACT

The present disclosure provides compositions and methods for direct transfection of organelle DNA in living cells. More particularly, the present disclosure is based on the use of viral vectors that contain localization signals specific for the target organelle. In one embodiment a viral vector that has been modified to express on its surface a protein transduction domain and an organelle localization signal is provided. A viral vector comprising a desired recombinant DNA construct is introduced into cell culture or injected into an organism, wherein the viral vector transduces across the cellular membrane through its protein transduction domain and localizes to the cellular organelle by way of the organelle localization/targeting signal introducing the recombinant DNA into the interior of the organelle

### CROSS REFERENCE TO RELATED APPLICATION

[0001] This application claims benefit of and priority to U.S. Provisional Patent Application No. 60/482,603 filed on Jun. 25, 2003, which is incorporated by reference herein in its entirety.

### INCORPORATION-BY-REFERENCE

[0002] This application incorporates by reference the sequence listing on the accompanying compact disc in its entirety. The filename for the sequence listing is 120701-8010.ST25.txt which was created on Jun. 23, 2004, and is about 772 KB.

### BACKGROUND

[0003] 1. Field of the Disclosure

[0004] The present disclosure is generally directed to compositions and methods for transfecting cells and organelles, in particular modified viral vectors for transfecting mitochondria and chloroplasts.

[0005] 2. Related Art

[0006] Mitochondria are the sole energy-producing organelles in all eukaryotic cells, and therefore play a critical role in maintaining proper cellular bioenergetics, homeostatic levels and cellular life cycles. Similarly, chloroplasts are also efficient ATP-producing machines that use light as the source of energy rather than sugars or fatty acids. Both mitochondria and chloroplasts contain multiple copies of organelle DNA that is replicated and transcribed in the organelles. In mammals, mitochondrial DNA (mtDNA) is a circular, approximately 16.5 kilobase, intronless genome that encodes 13 electron transport chain (ETC) proteins, 2 ribosomal RNA's and 22 tRNA's. Chloroplast genomes range in size from 40-150 kilobases. Most insights into mitochondrial genetics have come in yeast, where biolistic transformation allows for engineering of mitochondrial replicons. However, many features of mammalian mitochondrial gene expression and respiratory chain biogenesis are not reproducible in yeast.

[0007] In mammals, cytoplasmic fusion and microinjection are used to introduce donor mitochondria, but these techniques fail to provide a mechanism for the direct manipulation of mtDNA. In addition the uptake of exogenous DNA into mitochondria involving the protein import pathway has been reported from two laboratories. Vestweber and Schatz (1989) Nature (London) 338:170-172 achieved uptake of a 24-bp both single- and double-stranded oligonucleotide into yeast mitochondria by coupling the 5′ end of the oligonucleotide to a precursor protein consisting of the yeast cytochrome c oxidase subunit IV presequence fused to a modified mouse dihydrofolate reductase. More recently, Seibel et al. (1995) Nucleic Acids Research 23:10-17 reported the import into the mitochondrial matrix of double-stranded DNA molecules conjugated to the amino-terminal leader peptide of the rat ornithine-transcarbamylase. Both studies, however, were done with isolated mitochondria, not addressing the question of how oligonucleotide-peptide conjugates will pass the cytosolic membrane and reach mitochondrial proximity.

[0008] U.S. Pat. No. 6,171,863 discloses the use of dequalinium-DNA complexes as a vehicle for delivering DNA to the interior of cells and potentially to the mitochondria. Because the DNA is associated with dequalinium, the resulting complex has a positive charge. The positively charged complex is attracted to negatively charged compartments. Thus, U.S. Pat. No. 6,171,863 discloses delivery of DNA to negatively charged compartments, and does not disclose the specific delivery DNA to mitochondria or chloroplasts. Indeed, no technique has been disclosed for targeting specific organelles, for example the chloroplast or mitochondria, for the delivery of nucleic acids using a receptor-independent mechanism.

[0009] Thus, the inability to specifically manipulate the chloroplast and mitochondrial genome has hampered researchers' efforts to fully understand chloroplast and mtDNA replication, transcription, and translation processes. The ability to specifically manipulate mtDNA and introduce it into living cells would greatly enhance researchers' ability to fully investigate the function of individual chloroplast/mitochondrial genes and overall chloroplast/mitochondrial function.

[0010] Furthermore, the ability to manipulate the mitochondrial genome also provides a novel method of treating diseases associated with defective mitochondrial function. With age, the function of mitochondria decreases with a marked increase of mutations and large deletions of mtDNA. In particular, oxidative damage increases with age, often leading to a higher rate of mtDNA mutations. Aside from known mtDNA mutations, several forms of cancer and neurodegeneration are associated with mutations in mtDNA. For example, mutations in mitochondrial DNA are the suspected cause of a host of degenerative neurological diseases including Alzheimers, Parkinsons and adult-onset diabetes. These mutations result in decreased electron transport chain efficiency, and the build-up of mtDNA deletions due to free radical damage (aging).

[0011] In addition, given the bioenergetic functions of chloroplasts, the ability to introduce exogenous genes or otherwise manipulate the chloroplast genome could have a tremendous impact on increasing the vitality and yields of crops and other plants. For example, introduction of genes into chloroplast may lead to plants with increased viability in otherwise hostile environments and increased efficiency of photosynthesis. In addition, the expression of exogenous genes within the chloroplasts is believed to be significantly more efficient in chloroplasts relative the expression of exogenous genes introduced into the nucleus of the cell. Thus transfection of chloroplasts may allow for more effective biosynthesis strategies for commercial compounds.

[0012] In light of the numerous disease conditions related to organelle dysfunction, there is a need for methods and compositions for treating such disease conditions. Accordingly, there is also a need for improved methods and compositions for introducing polynucleotides into specific organelles.

[0013] There is also a need for methods of treating diseases related to organelle dysfunction including targeting polynucleotides to dysfunctional organelles or cells.

### SUMMARY OF THE DISCLOSURE

[0014] The present disclosure is generally directed to compositions, methods and systems for introducing polynucleotides into an cell or organelle of a cell, for example a eukaryotic cell. One aspect of the present disclosure provides nucleic acid constructs and methods for delivering nucleic acids to specific organelles. The targeting of polynucleotides to specific organelles can be accomplished without using receptor mediated localization techniques. Receptor mediated localization techniques means techniques in which the polynucleotide construct displays a ligand or receptor that is recognized by its complement on a specific organelle. A particular aspect of the disclosure provides methods and compositions for transfecting organelles by incorporating a protein transduction domain (PTD) in combination with an organelle localization/targeting signal on a vector, for example a viral vector. In one aspect of the disclosure, targeting signals do not act through a receptor:ligand interaction. Typically, the modified virus expresses both a protein transduction domain as well as an organelle localization/targeting signal that can associate with a specific organelle. Suitable viral vectors include but are not limited to a viral vector such as bacteriophage lambda. Exemplary PTDs include but are not limited to HIV TAT YGRKKRRQRRR (SEQ. ID NO. 3) or RKKRRQRRR (SEQ. ID NO. 4); 11 Arginine residues, or positively charged polypeptides or polynucleotides having 8-15 residues, preferably 9-11 residues. Exemplary organelle localization signals include but are not limited to those listed in Tables 1 and 2.

[0015] Another aspect of the disclosure provides a system including an intact viable cell or organism that contains a recombinant vector. The recombinant vector can specifically cross the plasma membrane of the organism or cell and can localize/target to a specific organelle. The cell or organism can further contain a genome modified by the recombinant vector.

[0016] Other aspects of the disclosure provide methods of correcting polynucleotide defects, including heritable polynucleotide defects or acquired polynucleotide defects, augmenting expression of specific nucleic acids, interfering with the expression of specific nucleic acids, restoring or augmenting organelle function, increasing biosynthesis of specific nucleic acids and their corresponding proteins using targeted delivery of nucleic acids to specific cellular organelles or compartments.

[0017] Still other aspects of the present disclosure are directed to minimizing or reducing disease progression, alleviating symptoms, and adjusting cellular metabolism by transfecting specific organelles. Particular aspects are directed targeted delivery of nucleic acids to organelles containing the components for replication, transcription, or translation, or a combination thereof such as the mitochondrion or chloroplast.

[0018] Another aspect of the disclosure provides compositions and methods for producing cell lines with depleted mitochondrial DNA.

### BRIEF DESCRIPTION OF THE DRAWINGS

[0019] FIG. 1A is a diagram of a modified bacteriophage lambda expressing a fusion protein of Head protein gpD including a Protein Transduction Domain, an organelle targeting signal, and a reporter protein (Red Fluorescent Protein).

[0020] FIG. 1B is a diagram of the 1185 nucleotide construct PTD-MLR-gpD encoding a Protein Transduction Domain, Mitochondrial Targeting Signal, Red Fluorescent Protein fusion with gene product D.

[0021] FIG. 1C is a diagram of plasmid pEXP-TMRD.

[0022] FIG. 2A is a diagram of a full-length mtDNA PCR amplicon generated with sense and anti-sense primers containing internal BgIII and NotI sites, respectively.

[0023] FIG. 2B is a diagram of a full length mtDNA amplicon ligated to Green Fluorescent Protein (GFP) DNA.

[0024] FIG. 3 is a diagram of full length mtDNA/GFP ligated to SuperCos-1.

[0025] FIG. 4 is a panel of confocal fluorescence micrographs showing Mitochondrial Targeting Signal with Red Fluorescent Protein and Protein Transduction Domain Containing Bacteriophage Lambda colocalizing with mitochondria in Sy5y cells in culture over a 40 minute time period. The 40-minute micrograph includes mitochondria specific dye, Mitotracker Green (Molecular Probes) to verify mitochondrial localization.

[0026] FIGS. 5A and 5B are Western Blots mitochondrial fractions of transfected cells generated at specific time points using antibodies to Red Fluorescent Protein (RFP).

[0027] FIG. 6A is a gel showing GFP message detected in mitochondrial fractions.

[0028] FIG. 6B is a collection of panels (a)-(d). Panels (a)-(c) are confocal fluorescence micrographs of rho⁰ cells (a) 24 hours after transfection with RFP recombinant phage; (b) initially transfected with pMLS-LambdaR (no RFP) following second transfection with SuperCos-1/mtDNA/GFP cosmid; and (c) companion images of MitoTracker Red staining (c) to reveal location of mitochondria. Panel (d) is a scatterplot comparing fluorescence intensities among MitoTracker Red mitochondrial clusters and GFP reporter gene expression.

[0029] FIG. 7 is a histogram showing dsRNA knockdown of POlG.

### DETAILED DESCRIPTION OF THE DISCLOSURE

1. Definitions

[0030] In describing and claiming the disclosure, the following terminology will be used in accordance with the definitions set forth below.

[0031] As used herein, the term “purified” and like terms relate to the isolation of a molecule or compound in a form that is substantially free (at least 60% free, preferably 75% free, and most preferably 90% free) from other components normally associated with the molecule or compound in a native environment.

[0032] As used herein, the term “pharmaceutically acceptable carrier” encompasses any of the standard pharmaceutical carriers, such as a phosphate buffered saline solution, water and emulsions such as an oil/water or water/oil emulsion, and various types of wetting agents.

[0033] As used herein, the term “treating” includes alleviating the symptoms associated with a specific disorder or condition and/or preventing or eliminating said symptoms.

[0034] “Operably linked” refers to a juxtaposition wherein the components are configured so as to perform their usual function. For example, control sequences or promoters operably linked to a coding sequence are capable of effecting the expression of the coding sequence, and an organelle localization sequence operably linked to protein will direct the linked protein to be localized at the specific organelle.

[0035] “Organelle Localization Signal” or “Organelle Targeting Signal” are used interchangeably and refer to a signal that directs a molecule to a specific organelle. The signal can be polynucleotide or polypeptide signal, or can be an organic or inorganic compound sufficient to direct an attached molecule to a desired organelle. Exemplary organelle localization signals are provided in Tables 1 and 2 and described in Emanuelson et al., Predicting Subcellular Localization of Proteins Based on Their N-terminal Amino Acid Sequence. Journal of Molecular Biology. 300(4):1005-16, 2000 Jul. 21, and in Cline and Henry, Import and Routing of Nucleus-encoded Chloroplast Proteins. Annual Review of Cell & Developmental Biology. 12:1-26, 1996, the disclosures of which are incorporated herein by reference in their entirety. It will be appreciated that the entire sequence listed in Tables 1 and 2 need not be included, and modifications including truncations of these sequences are within the scope of the disclosure provided the sequences operated to direct a linked molecule to a specific organelle. Organelle localization signals of the present disclosure can have 80 to 100% homology to the sequences in Tables 1 and 2. Suitable organelle localization signals include those that do not interact with the targeted organelle in a receptor:ligand mechanism. For example, organelle localization signals include signals having or conferring a net charge, for example a positive charge. Positively charged signals can be used to target negatively charged organelles such as the mitochondria. Negatively charged signals can be used to target positively charged organelles.

[0036] “Protein Transduction Domain” or PTD refers to a polypeptide, polynucleotide, or organic or inorganic compounds that facilitates traversing a lipid bilayer, micelle, cell membrane, organelle membrane, or vesicle membrane. A PTD attached to another molecule facilitates the molecule traversing membranes, for example going from extracellular space to intracellular space, or cytosol to within an organelle. Exemplary PTDs include but are not limited to HIV TAT YGRKKRRQRRR (SEQ. ID NO. 3) or RKKRRQRRR (SEQ. ID NO. 4); 11 Arginine residues, or positively charged polypeptides or polynucleotides having 8-15 residues, preferably 9-11 residues.

[0037] As used herein, the term “exogenous DNA” or “exogenous nucleic acid sequence” refers to a nucleic acid sequence that was introduced into a cell or organelle from an external source. Typically the introduced exogenous sequence is a recombinant sequence.

[0038] As used herein, the term “transfection” refers to the introduction of a nucleic acid sequence into the interior of a membrane enclosed space of a living cell, including introduction of the nucleic acid sequence into the cytosol of a cell as well as the interior space of a mitochondria, nucleus or chloroplast. The nucleic acid may be in the form of naked DNA or RNA, associated with various proteins or the nucleic acid may be incorporated into a vector.

[0039] As used herein, the term “vector” is used in reference to a vehicle used to introduce a nucleic acid sequence into a cell. A viral vector is virus that has been modified to allow recombinant DNA sequences to be introduced into host cells or cell organelles.

[0040] As used herein, the term “organelle” refers to cellular membrane bound structures such as the chloroplast, mitochondrion, and nucleus. The term “organelle” includes natural and synthetic organelles.

[0041] As used herein, the term “non-nuclear organelle” refers to any cellular membrane bound structure present in a cell, except the nucleus.

[0042] As used herein, the term “polynucleotide” generally refers to any polyribonucleotide or polydeoxribonucleotide, which may be unmodified RNA or DNA or modified RNA or DNA. Thus, for instance, polynucleotides as used herein refers to, among others, single- and double-stranded DNA, DNA that is a mixture of single- and double-stranded regions, single- and double-stranded RNA, and RNA that is mixture of single- and double-stranded regions, hybrid molecules comprising. DNA and RNA that may be single-stranded or, more typically, double-stranded or a mixture of single- and double-stranded regions. The term “nucleic acid” or “nucleic acid sequence” also encompasses a polynucleotide as defined above.

[0043] In addition, polynucleotide as used herein refers to triple-stranded regions comprising RNA or DNA or both RNA and DNA. The strands in such regions may be from the same molecule or from different molecules. The regions may include all of one or more of the molecules, but more typically involve only a region of some of the molecules. One of the molecules of a triple-helical region often is an oligonucleotide.

[0044] As used herein, the term polynucleotide includes DNAs or RNAs as described above that contain one or more modified bases. Thus, DNAs or RNAs with backbones modified for stability or for other reasons are “polynucleotides” as that term is intended herein. Moreover, DNAs or RNAs comprising unusual bases, such as inosine, or modified bases, such as tritylated bases, to name just two examples, are polynucleotides as the term is used herein.

[0045] It will be appreciated that a great variety of modifications have been made to DNA and RNA that serve many useful purposes known to those of skill in the art. The term polynucleotide as it is employed herein embraces such chemically, enzymatically or metabolically modified forms of polynucleotides, as well as the chemical forms of DNA and RNA characteristic of viruses and cells, including simple and complex cells, inter alia.

[0046] Oligonucleotides refers to relatively short polynucleotides. Often the term refers to single-stranded deoxyribonucleotides, but it can refer as well to single-or double-stranded ribonucleotides, RNA:DNA hybrids and double-stranded DNAs, among others.

[0047] As used herein the term “vector” means a polynucleotide molecule originating from a virus, a plasmid, or the cell of a higher organism into which another polynucleotide fragment of appropriate size can be integrated without loss of the vectors capacity for self-replication. Vectors introduce foreign or exogenous DNA into host cells, where it can be reproduced in large quantities. Examples are plasmids, cosmids, lambda phage vectors, P1 bacteriophage vectors, yeast artificial chromosomes, and mammalian artificial chromosomes. Vectors are often recombinant molecules containing nucleotide sequences sequences from several sources.

2. Transfection Compositions

[0048] The provided compositions include a polynucleotide vector operably linked to a protein transduction domain and a targeting signal. One embodiment provides a vector having a polynucleotide encoding a protein transduction domain operably linked to a targeting signal, wherein the protein transduction domain operably linked to the targeting signal is displayed on an exterior surface of the vector. The disclosed compositions and methods are useful for the transfection of eukaryotic cells and organelles, in particular mammalian cells and organelles. Cellular organelles have significant roles in the life cycle of cells and their hosts. For example, mitochondria and chloroplasts are the “powerhouses” of animal and plant cells. Because of their critical activity in maintaining cell life and bioenergetics, they play major roles in cell function and cell death. They possess their own unique genomes—which, until now, have remained unsuited to manipulation. Accordingly, some embodiments of the present disclosure provide compositions and methods for the delivery of a polynucleotide to a specific organelle, for example to mitochondria and chloroplasts. Delivered polynucleotides can encode a functional polypeptide that can be expressed in the organelle. Expression of the polypeptide in the organelle can modulate the function of the organelle and thereby alleviate symptoms of disease related to organelle dysfunction. In one embodiment, the mitochondrial genome (SEQ. ID. NO. 6) can be transfected into an organelle, either in whole or part. In other embodiments, the polynucleotide can encode an anti-sense polynucleotide or an enzymatic polynucleotide, including, but not limited to, a DNAzyme or ribozyme.

[0049] 2.1 Organelles

[0050] Other embodiments of the present disclosure are directed to specifically delivering polynucleotides to cellular compartments or organelles. The polynucleotides can encode a polypeptide or interfere with the expression of a different polynucleotide. Eukaryotic cells contain membrane bound structures or organelles. Organelles can have single or multiple membranes and exist in both plant and animal cells. Depending on the function of the organelle, the organelle can consist of specific components such as proteins and cofactors. The polynucleotides delivered to the organelle can encode polypeptides that can enhance or contribute to the functioning of the organelle. Some organelles, such as mitochondria and chloroplasts, contain their own genome. Nucleic acids are replicated, transcribed, and translated within these organelles. Proteins are imported and metabolites are exported. Thus, there is an exchange of material across the membranes of organelles. In some embodiments, polynucleotides encoding mitochondrial polypeptides are specifically delivered to mitochondria.

[0051] Exemplary organelles include the nucleus, mitochondrion, chloroplast, lysosome, peroxisome, Golgi, endoplasmic reticulum, and nucleolus. Synthetic organelles can be formed from lipids and can contain specific proteins within the lipid membranes. Additionally, the content of synthetic organelles can be manipulated to contain components for the translation of nucleic acids.

[0052] 2.1.1 Mitochondria

[0053] In other embodiments of the present disclosure, modified vectors are disclosed that specifically deliver polynucleotides to mitochondria. Mitochondria contain the molecular machinery for the conversion of energy from the breakdown of glucose into adenosine triphosphate (ATP). The energy stored in the high energy phosphate bonds of ATP is then available to power cellular functions. Mitochondria are mostly protein, but some lipid, DNA and RNA are present. These generally spherical organelles have an outer membrane surrounding an inner membrane that folds (cristae) into a scaffolding for oxidative phosphorylation and electron transport enzymes. Most mitochondria have flat shelf-like cristae, but those in steroid secreting cells may have tubular cristae. The mitochondiral matrix contains the enzymes of the citric acid cycle, fatty acid oxidation and mitochondrial nucleic acids.

[0054] Mitochondiral DNA is double stranded and circular. Mitochndrial RNA comes in the three standard varieties; ribosomal, messenger and transfer, but each is specific to the mitochondria. Some protein synthesis occurs in the mitochondria on mitochondrial ribosomes that are different than cytoplasmic ribosomes. Other mitochondrial proteins are made on cytoplasmic ribosomes with a signal peptide that directs them to the mitochondria. The metabolic activity of the cell is related to the number of cristae and the number of mitochondria within a cell. Cells with high metabolic activity, such as heart muscle, have many well developed mitochondria. New mitochondria are formed from preexisting mitochondria when they grow and divide.

[0055] The inner membranes of mitochondria contain a family of proteins of related sequence and structure that transport various metabolites across the membrane. Their amino acid sequences have a tripartite structure, made up of three related sequences about 100 amino acids in length. The repeats of one carrier are related to those present in the others and several characteristic sequence features are conserved throughout the family.

[0056] 2.1.2 Chloroplasts

[0057] In another embodiment, modified vectors disclosed herein specifically deliver polynucleotides to chloroplasts. The chloroplast is a photosynthetic organelle in eukaryotes with a double surrounding membrane. The fluid inside the double-membrane is called the stroma. The chloroplast has a nucleoid region to house its circular, naked DNA. The stroma is also the site of the Calvin Cycle. The Calvin Cycle is the series of enzyme-catalyzed chemical reactions that produce carbohydrates and other compounds from carbon dioxide.

[0058] Within the stroma are tiny membrane sacs called thylakoids. The sacs are stacked in groups. Each group is called a granum. There are many grana in each chloroplast. The thylakoid membranes are the site of photosynthetic light reactions. The thylakoids have intrinsic and extrinsic proteins, some with special prosthetic groups, allowing for electrons to be moved from protein complex to protein complex. These proteins constitute an electron transport system sometimes known as the Z-scheme.

[0059] The prosthetic group for two critical membrane proteins (P680 and P700) is a chlorophyll a pigment molecule. These chlorophyll-binding proteins give the thylakoids an intense green color. The many thylakoids in a chloroplast give the chloroplast a green color. The many chloroplasts in a leaf mesophyll cell give that cell a green color. The many mesophyll cells in a leaf give the leaf a green color. The chlorophyll molecule absorbs light energy and an electron is boosted within the electron cloud in a resonating chemical structure surrounding a magnesium ion. This excited electron is removed by the surrounding electron transport proteins in the membrane. The movement of these electrons, and accompanying protons, results ultimately in the trapping of energy in a phosphate bond in ATP.

[0060] The thylakoid is thus the location for light absorption and ATP synthesis. The stroma uses the ATP to store the trapped energy in carbon-carbon bonds of carbohydrates. Some chloroplasts show developing starch grains. These represent complex polymers of carbohydrates for long-term storage.

[0061] Given the importance of mitochondria in human disease, cell proliferation, cell death, and aging, embodiments of the present disclosure encompass the manipulation of the mitochondrial genome to supply the means by which known mitochondrial diseases (LHON, MELAS, etc.) and putative mitochondrial diseases (aging, Alzheimers, Parkinsons, Diabetes, Heart Disease) can be treated. Given the bioenergetic functions of chloroplasts, the ability to introduce exogenous genes may lead to plants with increased viability in otherwise hostile environments and increased efficiency of photosynthesis. Furthermore, the expression of exogenous genes within the chloroplasts is believed to be significantly more efficient in chloroplasts relative the expression of exogenous genes introduced into the nucleus of the cell. Thus, other embodiments are directed to the transfection of chloroplasts for more effective biosynthesis strategies for commercial compounds.

[0062] Prior to the present disclosure, no effective techniques existed to introduce exogenous nucleic acids, for example DNA, and the genes they encode into mitochondria or chloroplasts using receptor-independent methods. Phylogenetically, mitochondria and chloroplasts resemble early bacteria. One embodiment of the present disclosure is directed to a system that utilizes viral vectors, and more preferably, bacterial viruses to transfect cell organelles including chloroplasts and mitochondria. This unique molecular approach to replace, augment, or otherwise modify the chloroplast and mitochondrial genome allows, for the first time, exploration of critical questions in chloroplast and mitochondrial genetics and the development of novel therapies for mitochondrial and chloroplast related diseases.

[0063] 2.2 Protein Transduction Domains

[0064] In still other embodiments, compositions for transfecting cells and organelles can be delivered from the outside of a cell or organelle to the interior of the cell or organelle by operably linking the compositions to a protein transduction domain (PTD). These small regions of proteins are able to cross the cell membrane in a receptor-independent mechanism. Although several of these PTD's have been documented, the two most commonly employed PTDs are derived from TAT (Frankel and Pabo, 1988) protein of HIV and Antennapedia transcription factor from Drosphila, whose PTD is known as Penetratin. (Derossi et al., 1994)

[0065] The Antennapedia homeodomain is 68 amino acid residues long and contains four alpha helices. Penetratin (SEQ. ID NO. 1) is an active domain of this protein which consists of a 16 amino acid sequence derived from the third helix of Antennapedia. (Fenton et al., 1998) TAT protein (SEQ. ID NO. 2) consists of 86 amino acids and is involved in the replication of HIV-1. The TAT PTD consists of an 11 amino acid sequence domain (residues 47 to 57; YGRKKRRQRRR (SEQ. ID. NO. 3)) of the parent protein that appears to be critical for uptake (Vives et al., 1997). Additionally, the basic domain Tat(49-57) or RKKRRQRRR (SEQ. ID NO. 4) (Wender et al. 2000) has been shown to be a PTD. In the current literature TAT has been favored for fusion to proteins of interest for cellular import. Several modifications to TAT, including substitutions of Glutatmine to Alanine, i.e., Q→A, have demonstrated an increase in cellular uptake anywhere from 90% (Wender et al. 2000) to up to 33 fold in mammalian cells. (Ho et al. 2001) The most efficient uptake of modified proteins was revealed by mutagenesis experiments of TAT-PTD, showing that an 11 arginine stretch was several orders of magnitude more efficient as an intercellular delivery vehicle.

[0066] 2.2.1 Properties of TAT-PTD

[0067] 2.2.1.1 Highly Efficient Uptake

[0068] Intracellular delivery of various therapeutic proteins involving TAT-PTD fusions have proven to be quite effective. This type of fusion protein was recently utilized in the delivery of biologically active heat shock protein 70 (HSP70) into HSF −/− cells and was compared to delivery of recombinant HSP7 for the ability to confer cytoprotection against thermal stress and hyperoxia. Immunocytochemistry demonstrated accumulation of intracellular HSP70 in nearly 100% of cells treated with the TAT-PTD fusion while the cells treated with recombinant HSP70 demonstrated no intracellular accumulation of recombinant HSP70 protein. (D. S. Wheeler et al, 2003) Other antioxidant enzymes such as superoxide dismutase (SOD) and catalase (CAT) have also been fused to TAT for intracellular delivery. With the introduction of Tat-SOD and Tat-CAT, HeLa cells experienced an approximately 90% increase in cell viability as compared to controls. (Jin et al, 2001)

[0069] Intraperitoneal (i.p.) injection of TAT-PTD anti-apoptotic protein fusions have also demonstrated significant uptake and efficacy in neuronal cells. Intraperitoneal injection of PTD-HA-Bcl-xL into mice within 1-2 hours demonstrated the ability of fusion proteins to cross the blood brain barrier. The protein fusion was able to decrease cerebral infarction up to 40% upon initiation of cerebral ischemia. (Cao, et al. 2002) A similar study utilized a Bcl-x mutant (FNK), with increased anti-apoptotic activity, to protect SH-SY5Y neurblastoma cells in vitro when exposed to staurosporine-induced apoptosis and glutamate-induced excitotoxicity. This Tat-FNK fusion was also injected i.p. into gerbils and prevented delayed neuronal death in the hippocampus caused by transient global ischemia. (Asoh, 2002)

[0070] 2.2.1.2 Kinetics of Tat-PTD Fusions

[0071] Kinetic studies on the uptake of Tat-PTD have shown that an entire cell population can reach maximum uptake of the Tat-PTD within 30 seconds to 5 minutes of exposure. (Ho et al, 2001) Tat-PTD fusion proteins vary in uptake in a tissue specific manner and also depend on the structure and size of the protein fused. Stability of tranduced fusion proteins into cultured HeLa cells demonstrated a peak concentration at approximately two hours of incubation with a steady decrease up to seventy two hours later. (Jin et al 2001) Tat-PTD has also been attached to liposomes encapsulating HPTS to assess the ability of Tat-PTD to facilitate uptake of liposomal drugs into cells. Kintetic studies demonstrated accumulation in a time dependent manner. A peak concentration was achieved at approximately 24 hours and the Tat-PTD liposome fusion achieved a four fold increase in uptake as compared to Penetratin-PTD liposome fusions. (Tseng et al 2002) Tat-PTD has also been fused to Angiotensin II type I receptor (AT₁R) to investigate Tat-PTD fusion's transduction efficacy and functionality in neurons. Neuronal cultures, isolated from the hypothalamus and brainstem of 1 day old Wistar-Kyoto rats (WKY), were incubated with 300 ug/ML of the recombinant protein and peak florescence was noted at 30 minutes of incubation with initial fluorescence recorded within minutes. (Vazquez et al 2002) The figure below demonstrates that uptake of Tat-ptd fusions varies based on the type of fusion as well as cellular target for uptake.

[0072] 2.2.1.3 Cytotoxicity

[0073] The parent protein of the Tat-PTD, TAT-HIV-1 protein (SEQ. ID NO. 2), elicits inflammatory responses in several cell types. Brain microvascular endothelial cells (BMEC) exposed to Tat demonstrate marked increased levels of cellular oxidative stress, decreased levels of intracellular glutathione and activated DNA binding activity and transactivation of NF-kappaB and AP-1. (Toborek et al 2003). In noting the toxicity of the parent protein the fear that Tat-PTD may exhibit similar cytotoxicity when introduced into cell culture or animal models was legitimate. However, the literature to date indicates that the Tat-PTD can transduce proteins of interest to nearly 100% of a cell population without exhibiting cytotoxic effects. To overcome the difficulty of transducing primary cultures of bone cells with proteins of interests, Tat-PTD was fused to Hemaaglutinin and calcineurin to assess transduction efficiency. Exposure to both osteoblastas and osteoclasts in primary culture led to an almost 99% tranduction of the fusion protein with retention in approximately 50% of the cell for up to five days. No cytotoxicity was reported upon treatement with the Tat-PTD fusion. (Svetlana et al 2002) Tat-PTD fusions have also been efficacious in tranducing pancreatic islets. To test whether Tat-PTD fusions were functional in islets, Tat-PTD was fused to β-galactosidase and introduced into insulinoma βTC-3 cells. Nearly 100% of all cells were transduced after a 3 hour incubation. A key requirement for any therapeutic intervention with a Tat-PTD fusion is that no untoward changes in normal cell physiology or function occur. In order to ensure proper secretion of insulin, islets were transduced with Tat-PTD-Bcl-XL. The fusion was shown to reverse hyperglycemia in diabetic nude mice with the same time frame as control islets with no concomitant toxicity, thus confirming the promising use of Tat-PTD fusion proteins as potential therapeutic interventions. (Embury, et al., 2001).

[0074] 2.3 Organelle Targeting Signals: Mitochondria and Chloroplasts

[0075] In still other embodiments, targeting specific polynucleotides to organelles can be accomplished by modifying vectors to express specific organelle targeting sequences, signals, or domains. These sequences target specific organelles, but in some embodiments the interaction of the targeting sequence with the organelle does not occur through a traditional receptor:ligand interaction. The eukaryotic cell comprises a number of discrete membrane bound compartments, or organelles. The structure and function of each organelle is largely determined by its unique complement of constituent polypeptides. However, the vast majority of these polypeptides begin their synthesis in the cytoplasm. Thus organelle biogenesis and upkeep require that newly synthesized proteins can be accurately targeted to their appropriate compartment. This is often accomplished by amino-terminal signaling sequences, as well as post-translational modifications and secondary structure. For mitochondria and chloroplasts, several amino-terminal targeting sequences have been deduced and are included, in part, in Tables 1 and 2.

[0076] In one embodiment, the organelle targeting sequence can contain at least two, preferably 5-15, most preferably about 11 charged groups, causing the targeting sequence to be drawn to organelles having a net opposite charge. In another embodiment, the targeting sequence can contain a series of charged groups that cause the targeting sequence to be transported into an organelle either against or down an electromagnetic potential gradient. Suitable charged groups are groups that are charged under intracellular conditions such as amino acids with charged functional groups, amino groups, nucleic acids, and the like. Mitochondrial localization/targeting signals generally consist of a leader sequence of highly positively charged amino acids. This allows the protein to be targeted to the highly negatively charged mitochondria. Unlike receptor:ligand approaches that rely upon stochastic Brownian motion for the ligand to approach the receptor, the mitochondrial localization signal is drawn to mitochondria because of charge.

[0077] In order to enter the mitochondria, a protein generally must interact with the mitochondrial import machinery, consisting of the Tim and Tom complexes (Translocase of the Inner/Outer Mitochondrial Membrane). With regard to the mitochondrial targeting sequence, the positive charge draws the linked protein to the complexes and continues to draw the protein into the mitochondria. The Tim and Tom complexes allow the proteins to cross the membranes. Accordingly, one embodiment of the present disclosure delivers compositions of the present disclosure to the inner mitochondrial space utilizing a positively charged targeting sequence and the mitochondrial import machinery.

[0078] In yet another embodiment, the compositions of the present disclosure include an organelle targeting sequence, for example a mitochondria targeting sequence, operably linked to a protein transduction domain. The targeting sequence can be a positively charged sequence as discussed above, and typically does not operate through traditional receptor:ligand mechanisms. The PTD domain can be an HIV TAT sequence that assists the compositions in crossing lipid bilayers such as organelle membranes or plasma membranes.

[0079] 2.4 Expression of Proteins on Viral Heads: Phage Display

[0080] Suitable vectors of the present disclosure include, but are not limited to, viral vectors such as bacteriophage lambda. Bacteriophage lambda has emerged as an alternative vehicle for the surface display of peptides and proteins to the commonly used filamentous phage. There are a number of unique features that make lambda an attractive display vehicle including the ability to display multimeric proteins, no requirement for secretion of the displayed fusion protein and the means to vary the valency of the displayed fusion protein. Protein D (gpD) is an established fusion partner for phage display, fused at its N- or C-terminus (Sternberg and Hoess, PNAS 92, 1609 (1995); Mikawa et al., JMB 262, 21 (1996)). Protein D is a small major capsid protein (109 aa) which contributes to the stabilization of the phage head where it forms trimeric protrusions on the phage head. Protein D is a very efficient fusion partner for high level cytoplasmic expression of soluble heterologous proteins (Forrer and Jaussi, Gene 224, 24 (1998)).

[0081] 2.5 Modified Cells and Vectors

[0082] One embodiment provides a vector including a recombinant DNA sequence comprising an organelle localization signal operably linked to a sequence encoding a protein transduction domain. In this embodiment, the recombinant viral vector is engineered to contain a protein transduction domain selected for transducing the viral vector across cellular membranes. Thus, the use of such modified vectors eliminates the need for viral vectors that require transfection methods to introduce the viral vector into the cellular interior. For example, if the viral vector is a lambda bacteriophage, then the viral capsid proteins are modified to express a PTD and an organelle targeting signal on the viral surface.

[0083] In accordance with another embodiment a recombinant bacteriophage expressing a PTD and an mitochondrial targeting sequence is provided which can be used for organelle transfection, for example mitochondrial transfection, and more preferably lambda bacteriophage can be used to introduce exogenous nucleic acid sequences into mammalian mitochondria. This approach allows for direct manipulation of mtDNA and introduction of the circular genome at high-copy number, relying upon the properties of bacteriophage lambda to infect the cell's mitochondria. In particular, the 50 kilobase bacteriophage lambda genome can be engineered with large (>10 kilobase) inserts and packaged to form active lambda phage. In one embodiment, the only lambda sequences contained in the vector are the two cos sites (12 bp each) located at the 5′ and 3′ ends of a linear fragment to be packaged in a lambda particle, leaving up to about 50 kb available for a nucleic acid sequence of interest. The recombinant sequences may also include an origin of replication (usually ColE1) which allows replication in bacteria, and a gene coding for a selectable marker.

[0084] Another embodiment provides a recombinant lambda particle which displays a protein transduction domain and an organelle targeting signal. The lambda particle also includes a polynucleotide to be delivered to the organelle. Organelles can be transfected by contacting cells with the lambda particle. The lambda particle translocates across the cellular plasma membrane via the protein transduction domain and is targeted to the organelle via the targeting signal. The polynucleotide is then delivered to the organelle.

[0085] Because the minimal mitochondrial replicon is unknown, the complete human mitochondrial genome or partial fragment thereof can be inserted into lambda. In one embodiment this method is used to manipulate or replace mtDNA. In another embodiment the entire human mitochondrial genome (SEQ ID NO. 6) can be replaced by introduced sequences. For example, Rho⁰ cells can be first generated to remove endogenous mtDNA, followed by mitochondrial transfection, resulting in the entire mitochondrial genome of cells being replaced. Altematively, mitochondria can be transfected without first proceeding with the generation of Rho⁰ cells. In this case the introduced nucleic acid will be incorporated (recombined) with the existing endogenous mtDNA sequences resulting in the manipulation of the mtDNA sequences. Either method can be used to restore full functionality to damaged mitochondria.

[0086] In still another embodiment, a lambda phage vector is used wherein the structural capsid proteins of the bacteriophage have been modified to allow the bacteriophage to cross the cellular membrane using a PTD and targeted to the mitochondria using a mitochondrial targeting signal. Preferably the modified phage vector protein is one that allows for the expression of protein moieties such as PTD and an organelle targeting signal. Wild type lambda phage expresses gpD on its capsid or head. The viral capsid is composed of several proteins, including the gpD protein, and this protein can be modified to produce a bacteriophage that is capable of specifically crossing cellular membranes and targeting to organelles.

[0087] Suitable mitochondria localization sequences are known to those skilled in the art (see Table 1) and include the mitochondrial localization signal of subunit VIII of human cytochrome oxidase, the yeast cytochrome c oxidase subunit IV presequence and the amino-terminal leader peptide of the rat ornithine-transcarbamylase. In one embodiment the introduced sequences are expressed on the viral capsid head. Upon expression of the recombinant viral vector, the mitochondrial localization signal causes the viral vector to be localized to the mitochondria. Transfection of this host cell with a suitable viral vector will target the vector to the mitochondria.

[0088] Nucleic acids encoding a protein of a vector, for example a viral capsid protein for a viral vector, can be operatively linked to an organelle targeting sequence, for example amino acids used to import proteins into the mitochondria. This hybrid protein can be used to target nucleic acids to the organelle. Once inside the organelle, the nucleic acid can be integrated into the genome of the organelle. Thus, an embodiment of the present disclosure is directed to a polypeptide comprising at least a partial viral capsid protein sequence and organelle targeting sequence, for example the targeting sequences of Table 1 or Table 2. The hybrid polypeptide can be expressed independently or can be expressed as part of a viral vector.

[0089] Another embodiment provides a transfection system that comprises two components, the viral vector modified to express a PTD that delivers the nucleic acid of interest, for example RNA, DNA, or a combination thereof, to the cellular interior and a organelle targeting signal, wherein the construct comprises a nucleic acid sequence that encodes an organelle localization sequence operably linked to a viral surface protein specific for the viral vector. The PTD and the organelle targeting sequence can be expressed as separate polypeptides on the surface of the viral vector or in a single polypeptide sequence, fusion protein, on the surface of the viral vector. The nucleic acid construct also optionally includes a suitable promoter for expressing the fusion protein as well as any other necessary regulatory elements for expressing the fusion protein. Such regulatory elements are well known to those skilled in the art and will vary based on the fusion protein expression system. One viral vector suitable for use with the present disclosure is bacteriophage lambda. When bacteriophage lambda is used as the transfection vector, the component of the transfection system comprises a nucleic acid sequence encoding the lambda capsid protein(gpD) operably linked to the organelle localization sequence and protein transduction domain.

[0090] Recombinant viral vectors that comprise modified organelle targeting sequences that are expressed on the viral surface can be prepared using standard molecular biology techniques. In general, a host cell is transfected with a recombinant viral construct comprising a sequence that encodes an organelle localization signal and protein transduction domain operably linked to a sequence encoding the viral surface protein, for example a viral capsid protein. The organelle localization sequence allows a protein that is linked to the localization sequence (i.e., a fusion protein) to be delivered to the target organelle. According to one embodiment of the present disclosure, the localization sequence is used to target a viral vector to an organelle of choice, for example mitochondria or chloroplast, and thus provide a point for the introduced vector that targets to the organelle. The vector is introduced into the cytosol of the cell through its protein transduction domain and then binds to the organelle specific for the vector. The nucleic acid of interest within the vector is delivered into the target animal or plant organelle.

[0091] Organelle localization signals are known to those skilled in the art, and any of those signals can be used to target the viral vector to the target organelle. Localization sequences suitable for use in the present disclosure are described in Emahuelson et al., Predicting Subcellular Localization of Proteins Based on Their N-terminal Amino Acid Sequence. Journal of Molecular Biology. 300(4):1005-16, 2000 Jul. 21, and in Cline and Henry, Import and Routing of Nucleus-encoded Chloroplast Proteins. Annual Review of Cell & Developmental Biology. 12:1-26, 1996, the disclosures of which are incorporated herein by reference in their entirety. More particularly, a list of mitochondria localization signals for targeting linked proteins or nucleic acids to the mitochondria is listed in TABLE 1. A list of chloroplast localization signals for targeting linked proteins or nucleic acids to the chloroplasts is listed in TABLE 2. In one embodiment the mitochondria or chloroplast localization signal is operably linked to a virus surface protein. It will be appreciated that part or all of the sequences listed in Tables 1 and 2 can be used as organelle targeting sequences.

TABLE 1
Localization Signals for Targeting to the Mitochondria.
(verified using Mitochondrial Project MITOP Database -
http://mips.gsf.de/proj/medgen/mitop/)

| MITOP | SEQ. ID. | Gene | |
|---|---|---|---|
| Designation | NO. | Name | Gene Name Full |
| 106092 | 7 | Etfa | electron transfer flavoprotein alpha chain |
| | | | precursor - mouse (SEQ ID NO. 7) |
| 106098 | 8 | Etfb | electron transfer flavoprotein beta chain - |
| | | | mouse (SEQ ID NO. 8) |
| 107450 | 9 | Dld | dihydrolipoamide dehydrogenase precursor - |
| | | | human (SEQ ID NO. 9) |
| 87979 | 10 | Ak3 | nucleoside-triphosphate- adenylate kinase 3 - |
| | | | mouse (SEQ ID NO. 10) |
| 88529 | 11 | Cs | citrate synthase, mitochondrial (SEQ ID NO. |
| | | | 11) |
| 891996 | 12 | Cps1 | carbamoyl-phosphate synthetase 1 (SEQ ID |
| | | | NO. 12) |
| 97045 | 13 | Mod2 | malic enzyme complex, mitochondrial - mouse |
| | | | (SEQ ID NO. 13) |
| 97499 | 14 | Pcca | propionyl-CoA carboxylase alpha chain |
| | | | precursor - mouse (SEQ ID NO. 14) |
| A27883 | 15 | PCCA | propionyl-CoA carboxylase alpha chain |
| | | | precursor (SEQ ID NO. 15) |
| A28053 | 16 | Cbr2 | carbonyl reductase (NADPH) - mouse (SEQ |
| | | | ID NO. 16) |
| A29881 | 17 | mpp-2 | Mitochondrial processing peptidase beta |
| | | | subunit precursor (beta-mpp) (ubiquinol- |
| | | | cytochrome c reductase complexcore protein I) |
| | | | (SEQ ID NO. 17) |
| A30605 | 18 | ACADS | acyl-CoA dehydrogenase precursor, short- |
| | | | chain-specific (SEQ ID NO. 18) |
| A31998 | 19 | ETFA | electron transfer flavoprotein alpha chain |
| | | | precursor (SEQ ID NO. 19) |
| A32422 | 20 | DBT | Dihydrolipoamide S-(2- |
| | | | methylpropanoyl)transferase precursor (SEQ ID |
| | | | NO. 20) |
| A32800 | 21 | HSPD1 | heat shock protein 60 precursor (SEQ ID NO. |
| | | | 21) |
| A36442 | 22 | mpp-1 | Mitochondrial processing peptidase alpha chai [symbol] |
| | | | precursor (SEQ ID NO. 22) |
| A37033 | 23 | IVD | isovaleryl-CoA dehydrogenase precursor (SE [symbol] |
| | | | ID NO. 23) |
| A37157 | 24 | BCKD | 3-methyl-2-oxobutanoate dehydrogenase |
| | | | (lipoamide) E1-beta chain precursor |
| | | | (SEQ ID NO. 24) |
| A38234 | 25 | OGDH | Oxoglutarate dehydrogenase (lipoamide) |
| | | | precursor (SEQ ID NO. 25) |
| A39503 | 26 | ME2 | Malate dehydrogenase (NAD+) precursor, |
| | | | mitochondrial (SEQ ID NO. 26) |
| A40487 | 27 | FDXR | ferredoxin-NADP+ reductase, long form, |
| | | | precursor (SEQ ID NO. 27) |
| A40559 | 28 | ACADL | long-chain-acyl-CoA dehydrogenase (LCAD) |
| | | | (SEQ ID NO. 28) |
| A40872 | 29 | ALDH5 | aldehyde dehydrogenase (NAD+) 5 precursor, |
| | | | mitochondrial (SEQ ID NO. 29) |
| A41581 | 30 | CYP3 | peptidylprolyl isomerase 3 precursor |
| | | | (SEQ ID NO. 30) |
| A42224 | 31 | arg-2 | Carbamoyl-phosphate synthase, arginine- |
| | | | specific, small chain precursor (arginine-specif [symbol] |
| | | | carbamoyl-phosphate synthetase, glutamine |
| | | | chain) (cps-a) |
| | | | (SEQ ID NO. 31) |
| A42845 | 32 | BDH | D-beta-hydroxybutyrate dehydrogenase |
| | | | precursor (3-hydroxybutyrate dehydrogenase) |
| | | | (fragment) (SEQ ID NO. 32) |
| A45470 | 33 | HMGC | Hydroxymethylglutaryl-CoA lyase |
| | | | (SEQ ID NO. 33) |
| A47255 | 34 | Pcx | pyruvate carboxylase (SEQ ID NO. 34) |
| A53020 | 35 | PCCB | propionyl-CoA carboxylase beta chain |
| | | | precursor (SEQ ID NO. 35) |
| A53719 | 36 | GLUDP | glutamate dehydrogenase (NAD(P)+) 2 |
| | | | precursor (SEQ ID NO. 36) |
| A55075 | 37 | HspE1 | chaperonin-10 (SEQ ID NO. 37) |
| A55680 | 38 | ACADS | short/branched chain acyl-CoA dehydrogenase |
| | | | precursor (SEQ ID NO. 38) |
| A55723 | 39 | DCI | dodecenoyl-CoA Delta-isomerase precursor, |
| | | | mitochondrial (SEQ ID NO. 39) |
| A55724 | 40 | Acadm | Acyl-CoA dehydrogenase, medium-chain |
| | | | specific precursor (MCAD) (SEQ ID NO. 40) |
| AA227572 | 41 | WARS2 | tryptophanyl-tRNA synthetase 2 (mitochondrial - |
| | | | human (SEQ ID NO. 41) |
| AB029948 | 42 | SerRS | mitochondrial seryl-tRNA synthetase (cDNA |
| | | | FLJ20450 FIS, CLONE KAT05607) - human |
| | | | (SEQ ID NO. 42) |
| ACDL_MOUSE | 43 | Acadl | Acyl-CoA dehydrogenase, long-chain specific |
| | | | precursor (LCAD) (SEQ ID NO. 43) |
| AF047042 | 44 | CS | citrate synthase, mitochondrial (SEQ ID NO. |
| | | | 44) |
| AF097441 | 45 | FARS1 | phenylalanine-tRNA synthetase (FARS1) |
| | | | mRNA, nuclear gene encoding mitochondrial |
| | | | protein - human (SEQ ID NO. 45) |
| ATPO_HUMAN | 46 | ATP5O | ATP synthase oligomycin sensitivity conferral |
| | | | protein precursor, mitochondrial (SEQ ID NO. |
| | | | 46) |
| AXHU | 47 | FDX1 | adrenodoxin precursor (SEQ ID NO. 47) |
| CCHU | 48 | HCS | cytochrome c (SEQ ID NO. 48) |
| CCNC | 49 | cyc-1 | Cytochrome c (SEQ ID NO. 49) |
| CE06620 | 50 | — | Probable leucyl-tRNA synthetase, mitochondri [symbol] |
| | | | (SEQ ID NO. 50) |
| CE09597 | 51 | — | Pyruvate dehydrogenase (E2) dihydrolipoamid |
| | | | acetyltransferase (SEQ ID NO. 51) |
| CH10_MOUSE | 52 | Hspe1 | 10 KD heat shock protein, mitochondrial |
| | | | (hsp10) (10K chaperonin) mouse (SEQ ID NO. |
| | | | 52) |
| CH60_CAEEL | 53 | hsp60 | Chaperonin homolog hsp60 precursor (heat |
| | | | shock protein 60) (hsp-60) (SEQ ID NO. 53) |
| DEHUE2 | 54 | ALDH2 | aldehyde dehydrogenase (NAD+) 2 precursor, |
| | | | mitochondrial (SEQ ID NO. 54) |
| DEHUE | 55 | GLUD1 | glutamate dehydrogenase (NAD(P)+) precurso |
| | | | (SEQ ID NO. 55) |
| DEHULP | 56 | DLD | Dihydrolipoamide dehydrogenase precursor |
| | | | (SEQ ID NO. 56) |
| DEHUPA | 57 | PDHA1 | pyruvate dehydrogenase (lipoamide) alpha |
| | | | chain precursor (SEQ ID NO. 57) |
| DEHUPB | 58 | PDHB | pyruvate dehydrogenase (lipoamide) beta chai |
| | | | precursor (SEQ ID NO. 58) |
| DEHUPT | 59 | PDHA2 | pyruvate dehydrogenase (lipoamide) alpha |
| | | | chain precursor, testis-specific (E1) (SEQ ID |
| | | | NO. 59) |
| DEHUXA | 60 | BCKDH | 3-methyl-2-oxobutanoate dehydrogenase |
| | | | (lipoamide) alpha chain precursor (SEQ ID NO |
| | | | 60) |
| DEMSMM | 61 | Mor1 | malate dehydrogenase precursor, mitochondri [symbol] |
| | | | (SEQ ID NO. 61) |
| DSHUN | 62 | SOD2 | superoxide dismutase (Mn) precursor |
| | | | (SEQ ID NO. 62) |
| ECHM_HUMAN | 63 | ECHS1 | enoyl-CoA hydratase, mitochondrial (short |
| | | | chain enoyl-CoA hydratase (SCEH) (SEQ ID |
| | | | NO. 63) |
| GABT_HUMAN | 64 | ABAT | 4-aminobutyrate aminotransferase, |
| | | | mitochondrial precursor (gamma-amino-N- |
| | | | butyrate-transaminase) (GABA transaminase) |
| | | | (SEQ ID NO. 64) |
| GCDH_HUMAN | 65 | GCDH | glutaryl-CoA dehydrogenase precursor (GCD) |
| | | | human (SEQ ID NO. 65) |
| GCDH_MOUSE | 66 | Gcdh | Glutaryl-CoA dehydrogenase precursor (GCD) - |
| | | | mouse (SEQ ID NO. 66) |
| HCD1_CAEEL | 67 | — | Probable 3-hydroxyacyl-CoA dehydrogenase |
| | | | F54C8.1 (SEQ ID NO. 67) |
| HCD2_CAEEL | 68 | — | Probable 3-hydroxyacyl-CoA dehydrogenase |
| | | | B0272.3 (SEQ ID NO. 68) |
| HHMS60 | 69 | Hsp60 | heat shock protein 60 precursor (SEQ ID NO. |
| | | | 69) |
| HMGL_MOUSE | 70 | Hmgcl | hydroxymethylglutaryl-CoA lyase precursor |
| | | | (HG-CoA lyase) (HL) (3-hydroxy-3- |
| | | | methylglutarate-CoA lyase) (SEQ ID NO. 70) |
| I48884 | 71 | — | 2-oxoglutarate dehydrogenase E1 component |
| | | | (fragment) (SEQ ID NO. 71) |
| I48966 | 72 | Aldh2 | aldehyde dehydrogenase (NAD+) 2 precursor, |
| | | | mitochondrial (SEQ ID NO. 72) |
| I49605 | 73 | Acads | Acyl-CoA dehydrogenase, short-chain specific |
| | | | precursor (SCAD) (butyryl-CoA |
| | | | dehydrogenase) (SEQ ID NO. 73) |
| I52240 | 74 | ACAD | acyl-CoA dehydrogenase precurser, medium- |
| | | | chain-specific (SEQ ID NO. 74) |
| I55465 | 75 | PDK1 | pyruvate dehydrogenase kinase isoform 1 - |
| | | | human (SEQ ID NO. 75) |
| I57023 | 76 | Sod2 | superoxide dismutase (Mn) precursor |
| | | | (SEQ ID NO. 76) |
| I70159 | 77 | PDK2 | Pyruvate dehydrogenase kinase isoform 2 - |
| | | | human (SEQ ID NO. 77) |
| I70160 | 78 | PDK3 | pyruvate dehydrogenase kinase isoform 3 - |
| | | | human (SEQ ID NO. 78) |
| JC2108 | 79 | HADH | long-chain-fatty-acid beta-oxidation |
| | | | multienzyme complex alpha chain precursor, |
| | | | mitochondrial |
| | | | (SEQ ID NO. 79) |
| JC2109 | 80 | HADH | long-chain-fatty-acid beta-oxidation |
| | | | multienzyme complex beta chain precursor, |
| | | | mitochondrial |
| | | | (SEQ ID NO. 80) |
| JC2460 | 81 | PC | pyruvate carboxylase precursor (SEQ ID NO. |
| | | | 81) |
| JC4879 | 82 | SCHAD | 3-hydroxyacyl-CoA dehydrogenase, short |
| | | | chain-specific, precursor (SEQ ID NO. 82) |
| KIHUA3 | 83 | AK3 | nucleoside-triphosphate- adenylate kinase 3 |
| | | | (SEQ ID NO. 83) |
| M2GD_HUMAN | 84 | DMGD | Dimethylglycine dehydrogenase, mitochondrial |
| | | | precursor (ME2GLYDH) - human (SEQ ID NO |
| | | | 84) |
| MDHM_HUMA | 85 | MDH2 | malate dehydrogenase mitochondrial precurso |
| | | | (fragment) (SEQ ID NO. 85) |
| O75439 | 86 | PMPC | mitochondrial processing peptidase beta |
| | | | subunit precursor (beta-MPP) (P-52) (SEQ ID |
| | | | NO. 86) |
| ODO1_MOUSE | 87 | Ogdh | 2-oxoglutarate dehydrogenase E1 component |
| | | | (alpha-ketoglutarate dehydrogenase) |
| | | | (fragment) |
| | | | (SEQ ID NO. 87) |
| ODPA_CAEEL | 88 | — | Probable pyruvate dehydrogenase E1 |
| | | | component, alpha subunit precursor (PDHE1- [symbol] |
| | | | (SEQ ID NO. 88) |
| OWHU | 89 | OTC | ornithine carbamoyltransferase precursor |
| | | | (SEQ ID NO. 89) |
| OWMS | 90 | Otc | ornithine carbamoyltransferase precursor |
| | | | (SEQ ID NO. 90) |
| P21549 | 91 | AGXT | alanine- glyoxylate aminotransferase |
| | | | (SEQ ID NO. 91) |
| PUT2_HUMAN | 92 | ALDH4 | Delta-1-pyrroline-5-carboxylate dehydrogenas [symbol] |
| | | | precursor (P5C dehydrogenase) (SEQ ID NO. |
| | | | 92) |
| Q0140 | 93 | VAR1 | VAR1 - mitochondrial ribosomal protein |
| | | | (SEQ ID NO. 93) |
| Q10713 | 94 | KIAA0123 | mitochondrial processing peptidase alpha |
| | | | subunit precursor (alpha-MPP) (P-55) (HA152 [symbol] |
| | | | (SEQ ID NO. 94) |
| Q16654 | 95 | PDK4 | pyruvate dehydrogenase kinase isoform 4 - |
| | | | human |
| | | | (SEQ ID NO. 95) |
| ROHU | 96 | TST | thiosulfate sulfurtransferase (SEQ ID NO. 96) |
| S01174 | 97 | Got2 | aspartate transaminase precursor, |
| | | | mitochondrial |
| | | | (SEQ ID NO. 97) |
| S08680 | 98 | Mut | methylmalonyl-CoA mutase alpha chain |
| | | | precursor |
| | | | (SEQ ID NO. 98) |
| S13025 | 99 | nuo-40 | NADH dehydrogenase (ubiquinone) 40K chain |
| | | | (SEQ ID NO. 99) |
| S13048 | 100 | cyt | cytochrome c (SEQ ID NO. 100) |
| S16239 | 101 | Glud | glutamate dehydrogenase (NAD(P)+) precurso |
| | | | (SEQ ID NO. 101) |
| S23506 | 102 | Pdha1 | pyruvate dehydrogenase (lipoamide) |
| | | | (SEQ ID NO. 102) |
| S25665 | 103 | DLAT_h | dihydrolipoamide S-acetyltransferase heart - |
| | | | human (fragment) (SEQ ID NO. 103) |
| S26984 | 104 | — | probable DNA-directed RNA polymerase - |
| | | | mitochondrion plasmid maranhar (SGC3) |
| | | | (SEQ ID NO. 104) |
| S32482 | 105 | ETFB | electron transfer flavoprotein beta chain |
| | | | (SEQ ID NO. 105) |
| S38770 | 106 | Dci | 3,2-trans-enoyl-CoA isomerase, mitochondrial |
| | | | precursor (dodecenoyl-CoA delta-isomerase) |
| | | | (SEQ ID NO. 106) |
| S39807 | 107 | Bckdhb | 3-methyl-2-oxobutanoate dehydrogenase |
| | | | (lipoamide) beta chain (SEQ ID NO. 107) |
| S40622 | 108 | MUT | methylmalonyl-CoA mutase precursror (MCM) |
| | | | (SEQ ID NO. 108) |
| S41006 | 109 | — | hypothetical protein t05g5.6 (SEQ ID NO. 109) |
| S41563 | 110 | cit-1 | citrate (si)-synthase, mitochondrial |
| | | | (SEQ ID NO. 110) |
| S42366 | 111 | PRSS15 | Lon proteinase homolog (SEQ ID NO. 111) |
| S42370 | 112 | — | citrate synthase homolog (SEQ ID NO. 112) |
| S47532 | 113 | HSPE1 | heat shock protein 10 (SEQ ID NO. 113) |
| S53351 | 114 | ME2.1 | malate dehydrogenase (oxaloacetate- |
| | | | decarboxylating) (NADP+) precursor, |
| | | | mitochondrial |
| | | | (SEQ ID NO. 114) |
| S60028 | 115 | Fdxr | ferredoxin-NADP+ reductase precursor |
| | | | (SEQ ID NO. 115) |
| S65760 | 116 | Dbt | dihydrolipoamide transacylase precursor |
| | | | (SEQ ID NO. 116) |
| S71881 | 117 | Bckdha | branched chain alpha-ketoacid dehydrogenase |
| | | | chain E1-alpha precursor (SEQ ID NO. 117) |
| SCOT_HUMA | 118 | OXCT | Succinyl-CoA: 3-ketoacid-coenzyme A |
| | | | transferase precursor (succinyl CoA: 3-oxoacid |
| | | | CoA-transferase) (OXCT) (SEQ ID NO. 118) |
| SODM_CAEEL | 119 | sod-2 | Superoxide dismutase precursor (Mn) |
| | | | (SEQ ID NO. 119) |
| SODN_CAEEL | 120 | sod-3 | Superoxide dismutase precursor (Mn) |
| | | | (SEQ ID NO. 120) |
| SYHUAE | 121 | ALAS2 | 5-aminolevulinate synthase 2 (SEQ ID NO. |
| | | | 121) |
| SYHUAL | 122 | ALAS1 | 5-aminolevulinate synthase 1 precursor |
| | | | (SEQ ID NO. 122) |
| SYLM_HUMAN | 123 | KIAA0028 | Probable leucyl-TrNA synthetase, mitochondria |
| | | | precursor (Leucine-tRNA ligase) (Leurs) |
| | | | (KIAA0028) (SEQ ID NO. 123) |
| SYMSAL | 124 | Alas2 | 5-aminolevulinate synthase mitochondrial |
| | | | precursor (erythroid-specific) (ALAS-E) (SEQ ID |
| | | | NO. 124) |
| SYNCLM | 125 | leu-5 | leucine-tRNA ligase precursor, mitochondrial |
| | | | (SEQ ID NO. 125) |
| SYNCYT | 126 | cyt-18 | tyrosine-tRNA ligase precursor, mitochondrial |
| | | | (SEQ ID NO. 126) |
| SYWM_CAEEL | 127 | — | Probable tryptophanyl-tRNA synthetase, |
| | | | mitochondrial (tryptophan-tRNA ligase) |
| | | | (TRPRS) |
| | | | (SEQ ID NO. 127) |
| THTR_MOUSE | 128 | Tst | thiosulfate sulfurtransferase (SEQ ID NO. 128) |
| U80034 | 129 | MIPEP | mitochondrial intermediate peptidase |
| | | | (SEQ ID NO. 129) |
| U82328 | 130 | PDX1 | pyruvate dehydrogenase complex protein X |
| | | | subunit precursor (SEQ ID NO. 130) |
| XNHUDM | 131 | GOT2 | aspartate transaminase precursor, |
| | | | mitochondrial (SEQ ID NO. 131) |
| XNHUO | 132 | OAT | ornithine-oxo-acid transaminase precursor |
| | | | (SEQ ID NO. 132) |
| XNHUSP | 133 | AGXT | serine-pyruvate aminotransferase (SPT) |
| | | | (alanine-glyoxylate aminotransferase) (AGT) |
| | | | (SEQ ID NO. 133) |
| XNMSO | 134 | Oat | ornithine-oxo-acid transaminase precursor |
| | | | (SEQ ID NO. 134) |
| XXHU | 135 | DLAT | dihydrolipoamide S-acetyltransferase precurso |
| | | | (fragment) (SEQ ID NO. 135) |
| YAL044c | 136 | GCV3 | GCV3 - glycine decarboxylase, subunit H |
| | | | (SEQ ID NO. 136) |
| YBL022c | 137 | PIM1 | PIM1 - ATP-dependent protease, mitochondria |
| | | | (SEQ ID NO. 137) |
| YBL038w | 138 | MRPL16 | MRPL16 - ribosomal protein of the large |
| | | | subunit, mitochondrial (SEQ ID NO. 138) |
| YBL080c | 139 | PET112 | PET112 - required to maintain rho+ |
| | | | mitochondrial DNA (SEQ ID NO. 139) |
| YBL090w | 140 | MRP21 | MRP21 - Mitochondrial ribosomal protein |
| | | | (SEQ ID NO. 140) |
| YBR120c | 141 | CBP6 | CBP6 - apo-cytochrome B pre-mRNA |
| | | | processing protein (SEQ ID NO. 141) |
| YBR122c | 142 | MRPL36 | MRPL36 - ribosomal protein YmL36 precursor, |
| | | | mitochondrial (SEQ ID NO. 142) |
| YBR146w | 143 | MRPS9 | MRPS9 - ribosomal protein S9 precursor, |
| | | | mitochondrial (SEQ ID NO. 143) |
| YBR221c | 144 | PDB1 | PDB1 - pyruvate dehydrogenase (lipoamide) |
| | | | beta chain precursor |
| YBR227c | 145 | MCX1 | MCX1 - ClpX homologue in mitochondria |
| YBR251w | 146 | MRPS5 | MRPS5 - ribosomal protein S5, mitochondrial |
| YBR268w | 147 | MRPL37 | MRPL37 - ribosomal protein YmL37, |
| | | | mitochondrial |
| YBR282w | 148 | MRPL27 | MRPL27 - ribosomal protein YmL27 precursor, |
| | | | mitochondrial |
| YCR003w | 149 | MRPL32 | MRPL32 - ribosomal protein YmL32, |
| | | | mitochondrial |
| YCR024c | 150 | — | asn-tRNA synthetase, mitochondrial |
| YCR028c-a | 151 | RIM1 | RIM1 - ssDNA-binding protein, mitochondrial |
| YCR046c | 152 | IMG1 | IMG1 - ribosomal protein, mitochondrial |
| YDL202w | 153 | MRPL11 | MRPL11 - ribosomal protein of the large |
| | | | subunit, mitochondrial |
| YDR148c | 154 | KGD2 | KGD2 - 2-oxoglutarate dehydrogenase comple |
| | | | E2 component |
| YDR194c | 155 | MSS116 | MSS116 - RNA helicase of the DEAD box |
| | | | family, mitochondrial |
| YDR462w | 156 | MRPL28 | MRPL28 - ribosomal protein of the large subun |
| | | | (YmL28), mitochondrial |
| YFL018c | 157 | LPD1 | LPD1 - dihydrolipoamide dehydrogenase |
| | | | precursor |
| YGR244c | 158 | LSC2 | succinate-CoA ligase beta subunit |
| YHR008c | 159 | SOD2 | SOD2 - superoxide dismutase (Mn) precursor, |
| | | | mitochondrial |
| YIL070c | 160 | MAM33 | MAM33 - mitochondrial acidic matrix protein |
| YJL096w | 161 | MRPL49 | MRPL49 - ribosomal protein YmL49, |
| | | | mitochondrial |
| YJR113c | 162 | RSM7 | RSM7 - similarity to bacterial, chloroplast and |
| | | | mitochondrial ribosomal protein S7 |
| YKL040c | 163 | NFU1 | NFU1 - iron homeostasis |
| YLL027w | 164 | ISA1 | ISA1 - mitochondrial protein required for norma |
| | | | iron metabolism |
| YLR059c | 165 | REX2 | REX2 - putative 3′-5′ exonuclease |
| YML110c | 166 | COQ5 | COQ5 - ubiquinone biosynthesis, |
| | | | methyltransferase |
| YMR062c | 167 | ECM40 | ECM40 - acetylornithine acetyltransferase |
| YMR072w | 168 | ABF2 | ABF2 - high mobility group protein |
| YOL095c | 169 | HMI1 | HMI1 - mitochondrial DNA helicase |
| YOR040w | 170 | GLO4 | GLO4 - glyoxalase II (hydroxyacylglutathione |
| | | | hydrolase) |
| YOR142w | 171 | LSC1 | LSC1 - succinate-CoA ligase alpha subunit |
| YPL118w | 172 | MRP51 | MRP51 - strong similarity to S. kluyveri |
| | | | hypothetical protein |
| YPL135w | 173 | ISU1 | ISU1 - protein with similarity to iron-sulfur |
| | | | cluster nitrogen fixation proteins |
| YPL252c | 174 | YAH1 | YAH1 - similarity to adrenodoxin and ferrodoxi [symbol] |
| YPL262w | 175 | FUM1 | FUM1 - fumarate hydratase |
| YPR047w | 176 | MSF1 | MSF1 - phenylalanine-tRNA ligase alpha |
| | | | chain, mitochondrial |
| YPR067w | 177 | ISA2 | ISA2 - mitochondrial protein required for iron |
| | | | metabolism |

[0092] TABLE 2
Localization Signals for Targeting to the Chloroplast:

| | SEQ. | |
|---|---|---|
| Designation | ID NO. | Description |
| CA782533 | 178 | Transit peptide domain of the apicoblast |
| | | ribosomal protein S9 |
| P27456 | 179 | Pea glutathione reductase (GR) signal peptide |
| BAB91333 | 180 | NH₂-terminus of Cr-RSH encoding a putative |
| | | guanosine 3′,5′-bispyrophosphate (ppGpp) |
| | | synthase-degradase |
| CAB42546 | 181 | 14-3-3 proteins |
| AAC64139 | 182 | Chloroplast signal recognition particle |
| AAC64109 | 183 | including cpSRP54, cpSRP43 subunits |
| AAD01509 | 184 | or a fragment thereof |
| PWSPG, | 185 | Chloroplast transit peptides |
| FESP1, | 186 | |
| P00221, | 187 | |
| P05435, | 188 | |
| BAA37170, | 189 | |
| BAA37171, | 190 | |
| AAA81472 | 191 | |
| X52428 | 192 | AtOEP7, in particular the transmembrane |
| | | domain (TMD) and its C-terminal neighboring |
| | | seven-amino acid region (see Lee YJ, |
| | | Plant Cell 2001 Oct; 13(10): 2175-90) |
| CA757092, | 193 | THI1 N-terminal chloroplastic transit peptide, |
| CA755666 | 194 | in particular 4 to 27 residues |

The identification of the specific sequences necessary for translocation of a linked protein into a chloroplast or mitochondria can be determined using predictive software known to those skilled in the art, including the tools located at http://www.mips.biochem.mpg.de/cgi-bin/proj/medgen/mitofilter.

[0093] In another embodiment, a nucleic acid encoding a vector containing a protein transduction domain and organelle localization signal can be introduced into organelles of cells from a host, primary culture, or a cell line. For example, a viral vector operatively linked with an organelle targeting sequence can be used to transfect a eukaryotic cell line such that the nucleic acid sequence is stably integrated into the organelle genome of a cell of the cell line. The cell line can be a transformed cell line that can be maintained indefinitely in cell culture, or the cell line can be a primary cell culture. Exemplary cell lines are those available from American Type Culture Collection including plant cell lines which are incorporated herein by reference. The nucleic acid can be replicated and transcribed within the nucleus of a cell of the transfected cell line. The targeting sequence can be enzymatically cleaved if necessary such that the vector is free to remain in the target organelle.

[0094] Any eukaryotic cell can be transfected to produce organelles that express a specific nucleic acid, for example a metabolic gene, including primary cells as well as established cell lines. Suitable types of cells include but are not limited to undifferentiated or partially differentiated cells including stem cells, totipotent cells, pluripotent cells, embryonic stem cells, inner mass cells, adult stem cells, bone marrow cells, cells from umbilical cord blood, and cells derived from ectoderm, mesoderm, or endoderm. Suitable differentiated cells include somatic cells, neuronal cells, skeletal muscle, smooth muscle, pancreatic cells, liver cells, and cardiac cells. Suitable plant cells can be selected from monocots and dicots, and include corn, soybeans, legumes, grasses, and grains such as rice and wheat.

[0095] If the organelle to be targeted is a chloroplast, then the host cell can be selected from known eukaryotic photosynthetic cells. If the organelle to be transfected is the mitochondrion, than any eukaryotic cell can be used, including mammalian cells, for example human cells. The cells are transfected to either transiently or stably express the exogenous nucleic acid. In one embodiment a DNA construct encoding a reporter gene is integrated into the mitochondrial genome of a cell to produce a stable transgenic cell line that comprises organelles that express the desired reporter gene.

[0096] In another embodiment, siRNA or antisense polynucleotides (including siRNA or antisense polynucleotides directed to mtDNA related proteins) can be transfected into an organelle using the compositions described herein.

[0097] Another embodiment of the disclosure provides a cell having a modified organelle, wherein the modified organelle includes an exogenously introduced nucleic acid. An exogenous nucleic acid means a nucleic acid not naturally associated with the organelle or located in the organelle's interior. The nucleic acid expressed in the organelle can be transcribed and/or translated within the organelle. Additionally, the nucleic acid and its resultant protein can undergo posttranslational modification within the organelle, if necessary, to facilitate its function. Delivery of modified viral vectors to specific organelles can be accomplished using targeting sequences, for example the targeting sequences in Table 1.

[0098] Nucleic acids including but not limited to polynucleotides, anti-sense nucleic acids, peptide nucleic acids, natural or synthetic nucleic acids, nucleic acids with chemically modified bases, RNA, DNA, RNA-DNA hybrids, enzymatic nucleic acids such as ribozymes and DNAzymes, native/endogenous genes and non-native/exogenous genes and fragments or combinations thereof, can be introduced into organelles of a host cell, in particular organelles that can transcribe and or translate nucleic acids into proteins such as mitochondria and chloroplasts. In one embodiment of the present disclosure, all or part of the mitochondrial or chloroplastic genome can be introduced into an organelle. The nucleic acids can be introduced into the organelle with the vector when the vector crosses the organelle membrane via protein transduction domains.

3 Methods

[0099] In accordance with the present disclosure one exemplary method for transfecting a cellular organelle, for example non-nuclear organelles such as the mitochondria and chloroplasts, comprises the steps of contacting a cell with a recombinant vector, for example a viral vector, wherein the vector includes a protein transduction domain and an organelle targeting signal located on the surface of the vector. Suitable cells include cells capable of being transfected, for example eukaryotic cells. Organelle targeting signals of the present disclosure include polypeptides having a net positive charge and those listed in Tables 1 and 2. Suitable PTDs include but are not limited to HIV TAT YGRKKRRQRRR (SEQ. ID NO. 3) or RKKRRQRRR (SEQ. ID NO. 4); 11 Arginine residues, or positively charged polypeptides or polynucleotides having 8-15 residues, preferably 9-11 residues. The term non-nuclear organelle is intended to encompass all organelles other than the nucleus. It will be appreciated the viral vector express a organelle targeting signal which causes the vector to associate with the organelle, typically to an organelle having a net negative charge or a region having a negative charge. In one embodiment, the association of the targeting signal with the organelle does not occur through a receptor:ligand interaction. The association of the organelle and vector can be ionic, non-covalent, covalent, reversible or irreversible. Exemplary vector:organelle associations include but are not limited to protein-protein, protein-carbohydrate, protein-nucleic acid, nucleic acid-nucleic acid, protein-lipid, lipid-carbohydrate, antibody-antigen, or avidin-biotin. The organelle targeting signal on the surface of the vector can be a protein, peptide, antibody, antibody fragment, lipid, carbohydrate, biotin, avidin, steptavidin, chemical group, or other ligand that causes specific association between the organelle and vector, preferably an electromagnetic association as between oppositely charged moieties.

[0100] The specific interaction between the introduced vector and its target organelle can be accomplished by at least two methods. In one exemplary method a recombinant viral vector can be genetically engineered to express a targeting signal, for example as a component of a polypeptide expressed on the exterior of the vector so that the targeting signal is free to interact with the targeted the organelle. Preferably, the vector expresses a surface polypeptide that is specific to the target organelle. In another method the vector is modified to incorporate an exogenous targeting protein to which an organelle binds. Alternatively, a vector can be modified to specifically interact with a desired organelle, for example by expressing an antibody fragment that can bind to an epitope on a specific organelle. It will be appreciated by those of skill in the art that the vector can be chemically modified to have a net positive or negative charge depending on the modification agent. For example, a vector can be coated with polylysine or other agents containing a primary amino group. Additionally, amino groups can be linked to the vector or compound containing amino groups can be linked to the vector. The linkage can be reversible or irreversible, covalent or non-covalent. Other charged groups for conferring a charge to a compound are known in the art.

[0101] In accordance with another embodiment of the disclosure a modified or mutant lambda bacteriophage is used as a recombinant viral vector. Lambda phage possesses several capsid (head) proteins. gpD (gene product D) (SEQ. ID NO. 5) is a lambda phage head protein that when in its native conformation possesses free amino and carboxy termini. As such, it is common practice to express cDNA libraries on the lambda head to investigate protein interactions, wherein the expressed cDNAs are tethered to gpD at the amino or carboxy terminus and appear on the viral head surface. In order to utilize lambda phage as an organelle delivery vehicle, the free termini of gpD are modified to contain organelle targeting signals operably linked to a protein transduction domain. Accordingly, in one embodiment a lambda bacteriophage vector is selected as a delivery vehicle wherein lambda bacteriophage specifically expresses an organelle targeting signal and protein transduction domain (PTD) present on the viral capsid. The targeting signal can be a signal sequence that specifically interacts with an organelle. The PTD can also be a signal sequence that enables the viral vector to cross cellular membranes. The PTD can be positioned in the fusion protein such that after entry into the organelle, the PTD domain is cleaved from the surface of the vector causing the vector to remain trapped in the organelle. Alternatively, cleavage sites can be engineered into the expressed polypeptide so that a desired region of the polypeptide can be cleaved within the cell, for example cleavage of the PTD once the vector is localized within the organelle. The organelle targeting signal can also be cleaved from the surface of the vector. In a preferred embodiment, the PTD sequence is followed by the organelle targeting sequence. The signal sequence can be all or part of a protein, lipid, sugar group such as a carbohydrate or a combination thereof. In this embodiment the lambda vector is introduced into the extracellular space and contacts a cell, the vector transduces across the cellular membrane and binds to its target organelle via the expressed signal sequences, and the polynucleotide present in the vector is introduced into the organelle. It will be appreciated by those skilled in the art that the target organelle can be transfected extracellularlly or intracellularly. If the target organelle is transfected extracellularly, the transfected organelle can then be introduced to a cell using techniques known in the art such as fusion, electroporation, microinjection, ballistic bombardment, or liposomes.

[0102] Another embodiment provides a method for transfecting cellular organelles, for example eukaryotic organelles, by providing a virus having a targeting signal. The targeting signal can be a polypeptide, modified or unmodified, displayed on the surface of the virus which enables the virus to specifically associate with the target organelle. Exemplary targeting signals include mitochondrial targeting signals including the targeting signals listed in TABLE 1 and other signals having a net positive charge. Contacting a cell with the recombinant vector, for example a viral vector, in a manner that introduces the vector into the cytosol of said cell as an intact functioning vector. The vector then associates with its specific target organelle and the recombinant DNA is introduced into the organelle. Introduction of the recombinant DNA into the organelle can be accomplished by transducing the vector across organelle membranes via a protein transduction domain expressed on a surface of the vector.

[0103] Introduction of a vector into the cytosol of a eukaryotic cell, in an intact functional form, can be accomplished using standard techniques known to those skilled in the art or through modification of the recombinant vector with Protein Transduction Domains. Such transfection procedures include but are not limited to microinjection, electroporation, calcium chloride premeablization, polyethylene glycol permeabilization, protoplast fusion or cationic lipid premeablization. In one embodiment a viral vector is modified to include a Protein Transduction Domain that enables the entire vector to by transduced across a lipid bilayer including a cellular membrane, organelle membrane, or plasma membrane. Suitable PTDs include but are not limited to an 11 Arginine PTD or Tat-PTD (SEQ. ID NOs. 3 or 4).

[0104] In accordance with one embodiment a method is provided for introducing exogenous nucleic acid sequences into a mitochondrion of a mammalian cell. Any mitochondrial transfection technique should ensure that a nucleic acid crosses three membranes (the plasma membrane and the outer and inner mitochondrial membranes), addresses the high copy of mtDNA molecules, and utilizes a minimal, circular mitochondrial replicon. In one embodiment of the present disclosure a recombinant bacteriophage is used as a delivery vehicle for introducing nucleic acid sequences into an organelle, for example the mitochondrion, wherein the vector does not bind to a lambda phage receptor expressed on the surface of the mitochondrion. Rather, the lambda phage vector associates with the mitochondrion via a mitochondrial targeting sequence, for example a targeting sequence of Table 1.

[0105] 3.1 Transfection of Plants

[0106] Techniques for plant transfection are known in the art. For example, Agrobacterium tumefaciens and Agrobacterium rhizogenes both have the ability to transfer portions of their DNA into the genomes of plants and can be used to transfect plant cells. The mechanism by which they transfer DNA is the same, however the differences in the resulting phenotypes are attributed to the presence of a Ti plasmid in Agrobacterium tumefaciens and the Ri plasmid in Agrobacterium rhizogenes. The Ti plasmid DNA induces host plants to grow tumourous masses whereas the Ri plasmid DNA leads to the abundant proliferation of roots. Agrobacterium tumefacies is capable of infecting almost any plant tissue whereas Agrobacterium rhizogenes can only infect roots.

[0107] The Ti plasmid of Agrobacterium is a large, circular double stranded DNA molecule (T-DNA) of approximately 200 kb, which exist as an autonomous replicating unit. The plasmids are maintained within the bacteria and only a specific region (T-region) approximately 20 kb can be transferred from the bacteria to the host. To accomplish this transfer the Ti plasmid contains a series of genes that code for its own replication, excision from the plasmid, transfer to the host cell, incorporation into the host genome and the induction of tumor formation

[0108] Agrobacterium can detect and migrate towards injured plant cells through the detection of chemical signals leaking from the wounded plant. This detection process is referred to as chemotaxis. Agrobacterium can recognize plant compounds such as acetosyrinogone, sinapinic acid, coniferyl alcohol, caffeic acid and methylsyringic acid which induce the bacteria's virulence. To begin the infection process, Agrobacterium must bind itself to the host cell. This binding is achieved by a group of genes located within the bacterial chromosome. The bacteria can anchor at the site of injury, by the production of cellulose fibrils. The fibrils attach to the cell surface of the plant host and facilitate the clustering of other bacteria on the cell surface. It is believed that this clustering many help the successful transfer of T-DNA. Once bound to the host, the bacterium is free to begin the processing and transfer of the T-region. One embodiment of the present disclosure discloses transfecting a plant cell with Agrobacterium wherein the Agrobacterium has been modified to bind to a plant organgelle, for example a chloroplast. Agrobacterium can be futher modified to encode a nucleic acid of interest for expression in the organelle. Upon binding to the organelle, the Agrobacterium can deliver the target nucleic acid into the chloroplast.

[0109] To transfer the T-region of the Ti plasmid to the host cell organelle, the T-region must be processed such that it is excised from the plasmid and directed to the organelle. The T-region is excised from the Ti plasmid and directed into the host cell or organelle. Once properly packaged, the T-complex transfer is mediated by several proteins and is thought to be similar to bacterial conjugation. Once inside the plant cell or organelle, the T-complex is taken through the membrane.

4. Research Tools

[0110] In one embodiment, the present disclosure is used as a tool to investigate cellular consequences of mtDNA expression, the mechanisms of heteroplasmy, mtDNA replication and inheritance, as well as threshold effects. Mitochondrial mutant mice can be generated using this approach, allowing investigators to study mutations in mtDNA not found in nature. More particularly, the technology can be used to generate cells that contain mitochondria that have identical genotypes or varying degrees of heteroplasmy. To prepare homoplastic cells, Rho⁰ cells (devoid of mtDNA) are first prepared using RNA interference (RNAi). For example Rho⁰ cells can be generated using RNAi to the human mitochondrial DNA polymerase. Exemplary Rho⁰ cell lines are generated with RNAi to mitochondrial proteins involved in mtDNA maintenance. These Rho⁰ cells are maintained and propagated on pyruvate containing supportive media and then transfected with a functional mitochondria genome. After metabolic selection, by removing pyruvate from supportive media, only those cells that contain successfully transfected mitochondria will survive, thus generating a population of cells that all have identical mitochondria genomes.

[0111] Cell lines having varying degrees of heteroplasmy can then be generated in a controlled manner by fusing two or more homoplasmy cell lines to generate cybrids. Cybrids can be generated using any of the known technique for introducing organelles into a recipient cell, including but not limited to polyethylene glycol (PEG) mediated cell membrane fusion, cell membrane permeabilization, cell-cytoplast fusion, virus mediated membrane fusion, liposome mediated fusion, microinjection or other methods known in the art.

5. Transgenic Non-Human Animals

[0112] The techniques described in the present disclosure can also be used to generated transgenic non-human animals. In particular, zygote microinjection, nuclear transfers, blastomere electrofusion and blastocyst injection of embryonic stem (ES) cell cybrids have each provided feasible strategies for creating hetero- and homoplasmic mice containing mtDNA from mitofected cell lines (i.e. cells that containing transfected mitochondria). In one embodiment an embryonic stem (ES) cell is mitofected and injected into the blastocyst of a mammalian embryo as a means of generating chimeric mice. In another embodiment, embryonic stem (ES) cell cybrids (from mitofected cells and ES cell rhos, or from two separately mitofected cells) are first prepared, followed by blastocyst injection into embryos as shown in FIG. 3. The use of cells carrying specific mitofected mtDNA of interest allows the creation of transmitochondrial mice that are heteroplasmic or even homoplasmic for the mitofected DNA. In theory, this technique offers the prospect of transferring any mutant mtDNA that can be obtained from cultured mitofected cells into a whole organism model.

[0113] Using lambda for mtDNA transfection will allow investigations into questions such as the effect of varying proportions of the 5000 bp “common deletion”, which accumulates with aging, polymorphisms found in diabetes and neurodegenerative diseases, and dynamics of mtDNA complementation. There are also potential therapeutic uses of this approach. Targeted introduction of the normal mitochondrial genome offers treatment for both classic mtDNA-based diseases and diseases of aging such as neurodegenerative brain conditions and adult-onset diabetes, which have been associated with mtDNA-based mitochondrial dysfunction.

6. Kits

[0114] The present disclosure is also directed to a kit or pack that supplies the elements necessary to conduct transfection of eukaryotic organelles. In accordance with one embodiment a kit is provided comprising a protein construct, that encodes an organelle localizing signal and protein transduction domain operably linked to a lambda surface protein, and lambda packaging components for preparing a recombinant lambda vector. The kit may also include the lambda DNA sequences (the vector “arms”) for inserting a DNA sequence of interest and subsequent use in generating a recombinant lambda phage vector. In one embodiment the protein construct provided with the kit comprises a mitochondrial or chloroplast localization signal selected from those known to target to the organelle, partially listed in Tables I and II, and more particularly in one embodiment the protein construct comprises a sequence encoding a 11 Arginine stretch followed by the mitochondrial localization signal of subunit VIII of human cytochrome oxidase operably linked to the bacteriophage lambda gpD head protein.

[0115] In accordance with one embodiment a kit is provided comprising cells that contain either a mitochondria or chloroplast organelle that expresses an exogenous nucleic acid. In a further embodiment a kit is provided that comprises packaging components for a viral vector including the recombinant PTD-organelle targeting signal surface protein and viral DNA for preparing recombinant constructs. In one embodiment the kit is provided with recombinant PTD-organelle targeting signal lambda surface protein, lambda bacteriophage packaging extract, and lambda DNA. The individual components of the kits can be packaged in a variety of containers, e.g., vials, tubes, microtiter well plates, bottles, and the like. Other reagents can be included in separate containers and provided with the kit; e.g., positive control samples, negative control samples, buffers, cell culture media, etc. Preferably, the kits will also include instructions for use.

7. Methods of Treatment

[0116] Organelle dysfunction can cause disease in a host, for example a human host or a plant host. In particular, problems with mitochondria or chloroplasts can result in disease. Mitochondrial diseases result from failures of the mitochondria, specialized compartments present in every cell of the body except red blood cells. Cell injury and even cell death are result from mitochondrial failure. If this process is repeated throughout the body, whole systems begin to fail, and the life of the person in whom this is happening is severely compromised. The disease can be in children, for example individuals less that 18 years of age, typically less than 12 years of age, or adults, for example individuals 18 years of age or more. Thus, embodiments of the present disclosure are directed to treating a host diagnosed with an organelle related disease, in particular a mitochondrial disease, by introducing a vector into the host cell wherein the vector specifically binds to the organelle and wherein the vector comprises a nucleic acid encoding mitochondrial protein or peptide. The present disclosure encompasses manipulating, augmenting or replacing portions of the mammalian cell mitochondrial genome to treat diseases caused by mitochondrial genetic defects or abnormalities.

[0117] Exemplary mitochondrial diseases include but are not limited to: Alpers Disease; Barth syndrome; ã-oxidation defects; carnitine-acyl-carnitine deficiency; carnitine deficiency; co-enzyme Q10 deficiency; Complex I deficiency; Complex II deficiency; Complex III deficiency; Complex IV deficiency; Complex V deficiency; cytochrome c oxidase (COX) deficiency; Chronic Progressive External Ophthalmoplegia Syndrome (CPEO); CPT I Deficiency; CPT II deficiency; Glutaric Aciduria Type II; lactic acidosis; Long-Chain Acyl-CoA Dehydrongenase Deficiency (LCAD); LCHAD; mitochondrial cytopathy; mitochondrial DNA depletion; mitochondrial encephalopathy; mitochondrial myopathy; Mitochondrial Encephalomyopathy with Lactic Acidosis and Strokelike episodes (MELAS); Myoclonus Epilepsy with Ragged Red Fibers (MERRF); Maternally Inherited Leigh's Syndrome (MILS); Myogastrointestinal encephalomyopathy (MNGIE); Neuropathy, ataxia and retinitis pigmentosa (NARP); Leber's Hereditary Optic Neuropathy (LHON); Progressive external ophthalmoplegia (PEO); Pearson syndrome; Keams-Sayre syndrome (KSS); Leigh's syndrome; intermittent dysautonomia; pyruvate carboxylase deficiency; pyruvate dehydrogenase deficiency; respiratory chain mutations and deletions; Short-Chain Acyl-CoA Dehydrogenase Deficiency (SCAD); SCHAD; and Very Long-Chain Acyl-CoA Dehydrongenase Deficiency (VLCAD).

[0118] Some mitochondrial diseases are a result of problems in the respiratory chain in the mitochondira. The respiratory chain consists of four large protein complexes: I, II, III and IV (cytochrome c oxidase, or COX), ATP synthase, and two small molecules that ferry around electrons, coenzyme Q10 and cytochrome c. The respiratory chain is the final step in the energy-making process in the mitochondrion where most of the ATP is generated. Mitochondrial encephalomyopathies that can be caused by deficiencies in one or more of the specific respiratory chain complexes include MELAS, MERFF, Leigh's syndrome, KSS, Pearson, PEO, NARP, MILS and MNGIE.

[0119] The mitochondrial respiratory chain is made up of proteins that come from both nuclear and mtDNA. Although only 13 of roughly 100 respiratory chain proteins come from the mtDNA, these 13 proteins contribute to every part of the respiratory chain except complex II, and 24 other mitochondrial genes are required just to manufacture those 13 proteins. Thus, a defect in either a nuclear gene or one of the 37 mitochondrial genes can cause the respiratory chain to break down. It will be appreciated that the scope of the present disclosure includes transfecting mitochondria with at least one or part of one gene involved in mitochondrial function, in particular at least one or part of the 37 mitochondrial genes to restore or increase the function of the respiratory chain. Any or part of a mitochondrial genome, for example human mitochondrial genome SEQ ID NO: 6, may be introduced into a host mitochondrion using the methods described herein.

[0120] Diseases of the mitochondria appear to cause the most damage to cells of the brain, heart, liver, skeletal muscles, kidney and the endocrine and respiratory systems. Thus, transfection of mitochondria in these cells and tissues with specific nucleic acids is within the scope of the present disclosure, in particular transfection of mitochondria with nucleic acids encoding mitochondrial-encoded proteins rather than nuclear-encoded proteins. It will be appreciated that the mitochondria can be transfected to express any protein whether naturally present in the mitochondrion or not or naturally encoded by mtDNA or nuclear DNA. Depending on which cells are affected, symptoms may include loss of motor control, muscle weakness and pain, gastro-intestinal disorders and swallowing difficulties, poor growth, cardiac disease, liver disease, diabetes, respiratory complications, seizures, visual/hearing problems, lactic acidosis, developmental delays and susceptibility to infection.

[0121] Exmplary mtDNA mutations that can be addressed by the present disclosure include but are not limited to: tRNA^{leu}-A3243G, A3251G, A3303G, T3250C T3271C and T3394C; tRNA^{Lys}-A8344G, G11778A, G8363A, T8356C; ND1-G3460A; ND4-A10750G, G14459A; ND6-T14484A; 12S rRNA-A1555G; MTTS2-C12258A; ATPase 6-T8993G, T8993C; tRNA^{Ser}(UCN)-T7511C; 11778 and 14484, LHON mutations as well as mutations or deletions in ND2, ND3, ND5, cytochrome b, cytochrome oxidase I-III, and ATPase 8.

[0122] One embodiment of the present disclosure provides a method for restoring or increasing respiratory chain function in a host cell including introducing a vector into the host cell, wherein the vector specifically binds to the mitochondrion and comprises a nucleic acid that encodes a respiratory chain protein or peptide. The nucleic acid of the vector can be injected or otherwise delivered into the interior of the mitochondria when the vector targets the mitochondria, for example when the vector is bacteriophage lambda and the viral surface protein is gpD operably linked to a protein transduction domain and mitochondrial localization signal.

[0123] Another embodiment of the present disclosure provides a method for restoring or increasing cytochrome oxidase activity in a host including transfecting mitochondria in a cell, for example a skeletal muscle cell, wherein the vector comprises a nucleic acid that encodes cytochrome oxidase or a functional component thereof. A functional component means a part or fragment of the protein or protein complex or subunit that performs a biological function independently or in combination with another protein, fragment, or subunit.

[0124] Still another embodiment of the present disclosure provides a method of increasing or restoring β-oxidation in a host including obtaining cells from the host, transfecting an organelle in the cells from the host, introducing a vector comprising a nucleic acid encoding proteins involved in β-oxidation spiral and carnitine transport, wherein the vector specifically binds to the organelle; and introducing the transfected cells of the host back into the host. Other embodiments of the disclosure are directed to methods of restoring mitochondrial function lost or decreased as a result of point mutations or deletions. For example, KSS, PEO and Pearson, are three diseases that result from a type of mtDNA mutation called a deletion (specific portions of the DNA are missing) or mtDNA depletion (a general shortage of mtDNA). Thus, cells from hosts diagnosed with KSS, PEO, Pearson or similar disease can have their mitochondria transfected with the recombinant viral vector. A vector comprising a nucleic acid that corresponds to the deletion in the mtDNA causing the diseased state can be introduced into the cells. The vector will bind the organelle and deliver the nucleic acid into the interior of the mitochondria where the nucleic acid is expressed. The expression product can then incorporate into the mitochondria and increase or restore mitochondrial function. The transfected cells can be reintroduced in the host. It will be appreciated that the host's cells or other cells can be transfected as described herein and introduced into a host having a dysfunctional organelles, in particular mitochondria.

[0125] It will be appreciated by those skilled in the art that the present disclosure encompasses delivering either separately or in combination nucleic acids to the mitochondria that are naturally encoded by mtDNA or nuclear DNA.

[0126] The present disclosure also contemplates alleviating the symptoms of mitochondrial diseases by creating cells having tranfected and non-transfected mitochondria. Alternatively, all of the mitochondria in a cell can be transfected or replaced.

[0127] One embodiment provides a method for compensating for a mtDNA mutation in a host, the method including identifying a host having a mtDNA mutation, obtaining a cell comprising said mtDNA mutation from said host, transfecting a mitochondrion of the host cell, introducing a vector that specifically binds to the organelle into the host cell, wherein the vector comprises a nucleic acid that encodes a functional product corresponding to the mtDNA mutation, introducing said transfected cell into the host. A nucleic acid that encodes a functional product corresponding to the mtDNA mutation means a sequence that produces a protein without the corresponding mutation. For example, if a host cell has an ND4-A10750G mutation, the transfected nucleic acid would encode a wildtype product for the ND4 gene. The viral vector can be introduced into the host, for example, intravenously.

8. Depletion of Oganelle-Specific Polynucleotides

[0128] Another embodiment provides a method for depleting organelle polynucleotides, for example mitochondrial or chlorpolast polynucleotides. The method includes contacting a cell with at least one inhibitory nucleic acid, for example siRNA, specific for a polymerase, for example an organelle specific polymerase. One exemplary polymerase is POLγ. The inhbitory nucleic acid can be selected from sequences listed in TABLE 3 or a sequence having 80-100% homology to the sequences listed in TABLE 3. The inhibitor nucleic acid can be delivered to the organelle of interest using the compositions disclosed herein or using conventional transfection techniques.

[0129] Still another embodiment provides a method of depleting mtDNA in a cell including contacting the cell with an inhibitor of mtDNA replication or transcription. The inhibitor of mtDNA replication can be an antisense polynucleotide or a small inhibitory RNA, or a combination thereof. It will be appreciated that the inhibitor can be DNA, RNA or a combination thereof. Exemplary inhibitors are selected from Table 3.

[0130] In some embodiments, the inhibitor is specific for a gene involved in mitochondral DNA transcription or replication. Exemplary genes include, but are not limited to, Polγ, TFAM A and B, and mtSSB. Generally, genes that encode a mitochondrial or chloroplast polymerase can be used.

[0131] Another embodiment provides a cell having an inhibitory polynucleotide that specifically binds to a polynucleotide encoding a mitochondrial polymerase. The cell can contain an siRNA specific for a mitochondrial polymerase, for example Polγ or a vector that expresses the inhibitory polynucleotide.

9. Administration

[0132] The compositions provided herein may be administered in a physiologically acceptable carrier to a host. Preferred methods of administration include systemic or direct administration to a cell. The compositions can be administered to a cell or patient, as is generally known in the art for gene therapy applications. In gene therapy applications, the compositions are introduced into cells in order to transfect an organelle. “Gene therapy” includes both conventional gene therapy where a lasting effect is achieved by a single treatment, and the administration of gene therapeutic agents, which involves the one time or repeated administration of a therapeutically effective DNA or RNA.

[0133] The modified vector compositions can be combined in admixture with a pharmaceutically acceptable carrier vehicle. Therapeutic formulations are prepared for storage by mixing the active ingredient having the desired degree of purity with optional physiologically acceptable carriers, excipients or stabilizers (Remington's Pharmaceutical Sciences 16th edition, Osol, A. Ed. (1980)), in the form of lyophilized formulations or aqueous solutions. Acceptable carriers, excipients or stabilizers are nontoxic to recipients at the dosages and concentrations employed, and include buffers such as phosphate, citrate and other organic acids; antioxidants including ascorbic acid; low molecular weight (less than about 10 residues) polypeptides; proteins, such as serum albumin, gelatin or immunoglobulins; hydrophilic polymers such as polyvinylpyrrolidone, amino acids such as glycine, glutamine, asparagine, arginine or lysine; monosaccharides, disaccharides and other carbohydrates including glucose, mannose, or dextrins; chelating agents such as EDTA; sugar alcohols such as mannitol or sorbitol; salt-forming counterions such as sodium; and/or nonionic surfactants such as Tween, Pluronics or PEG.

[0134] The compositions of the present disclosure can be administered parenterally. As used herein, “parenteral administration” is characterized by administering a pharmaceutical composition through a physical breach of a subject's tissue. Parenteral administration includes administering by injection, through a surgical incision, or through a tissue-penetrating non-surgical wound, and the like. In particular, parenteral administration includes subcutaneous, intraperitoneal, intravenous, intraarterial, intramuscular, intrasternal injection, and kidney dialytic infusion techniques.

[0135] Parenteral formulations can include the active ingredient combined with a pharmaceutically acceptable carrier, such as sterile water or sterile isotonic saline. Such formulations may be prepared, packaged, or sold in a form suitable for bolus administration or for continuous administration. Injectable formulations may be prepared, packaged, or sold in unit dosage form, such as in ampules or in multi-dose containers containing a preservative. Parenteral administration formulations include suspensions, solutions, emulsions in oily or aqueous vehicles, pastes, reconsitutable dry (i.e. powder or granular) formulations, and implantable sustained-release or biodegradable formulations. Such formulations may also include one or more additional ingredients including suspending, stabilizing, or dispersing agents. Parenteral formulations may be prepared, packaged, or sold in the form of a sterile injectable aqueous or oily suspension or solution. Parenteral formulations may also include dispersing agents, wetting agents, or suspending agents described herein. Methods for preparing these types of formulations are known. Sterile injectable formulations may be prepared using non-toxic parenterally-acceptable diluents or solvents, such as water, 1,3-butane diol, Ringer's solution, isotonic sodium chloride solution, and fixed oils such as synthetic monoglycerides or diglycerides. Other parentally-administrable formulations include microcrystalline forms, liposomal preparations, and biodegradable polymer systems. Compositions for sustained release or implantation may include pharmaceutically acceptable polymeric or hydrophobic materials such as emulsions, ion exchange resins, sparingly soluble polymers, and sparingly soluble salts.

[0136] Pharmaceutical compositions may be prepared, packaged, or sold in a buccal formulation. Such formulations may be in the form of tablets, powders, aerosols, atomized solutions, suspensions, or lozenges made using known methods, and may contain from about 0.1% to about 20% (w/w) active ingredient with the balance of the formulation containing an orally dissolvable or degradable composition and/or one or more additional ingredients as described herein. Preferably, powdered or aerosolized formulations have an average particle or droplet size ranging from about 0.1 nanometers to about 200 nanometers when dispersed.

[0137] As used herein, “additional ingredients” include one or more of the following: excipients, surface active agents, dispersing agents, inert diluents, granulating agents, disintegrating agents, binding agents, lubricating agents, sweetening agents, flavoring agents, coloring agents, preservatives, physiologically degradable compositions (e.g., gelatin), aqueous vehicles, aqueous solvents, oily vehicles and oily solvents, suspending agents, dispersing agents, wetting agents, emulsifying agents, demulcents, buffers, salts, thickening agents, fillers, emulsifying agents, antioxidants, antibiotics, antifungal agents, stabilizing agents, and pharmaceutically acceptable polymeric or hydrophobic materials. Other “additional ingredients” which may be included in the pharmaceutical compositions are known. Suitable additional ingredients are described in Remington's Pharmaceutical Sciences, Mack Publishing Co., Genaro, ed., Easton, Pa. (1985).

[0138] Dosages and desired concentrations of modified vectors disclosed herein in pharmaceutical compositions of the present disclosure may vary depending on the particular use envisioned. The determination of the appropriate dosage or route of administration is well within the skill of an ordinary physician. Animal experiments provide reliable guidance for the determination of effective doses for human therapy. Interspecies scaling of effective doses can be performed following the principles laid down by Mordenti, J. and Chappell, W. “The use of interspecies scaling in toxicokinetics” In Toxicokinetics and New Drug Development, Yacobi et al., Eds., Pergamon Press, New York 1989, pp. 42-96.

### EXAMPLES

### Example 1

Modification of the Bacteriophage Lambda Head Protein D

[0139] gpD (gene product D) was PCR amplified using the Stratagene Hotstart Herculase PCR polymerase from Lambda genome (NEB) with the following forward and reverse primers designed to contain BgIII and NotI ends, respectively. Of note, the stop codon in the reverse oligonucleotide was removed. The cDNA was digested with BgIII and NotI (NEB) and cloned into the BgIII and NotI sites of pThioHisA (Stratagene). The resultant vector was named pThio-gpD. A start Methionine and subsequent 11 Arginine containing forward oligonucleotide was designed for PCR amplification of the mitochondrial localized Discosoma Red Fluorescent Protein (RFP) from pDsRed2-Mito (Clontech). The forward oligonucleotide also carried a 5′ KpnI site. The reverse oligonucleotide was designed to remove the stop codon from the mitochondrially localized RFP and a 5′ BgIII site was introduced. PCR amplification using Hotstart Herculase

[0140] PCR polymerase was carried out on pDsRed2-Mito using the forward and reverse primers mentioned to generate a cDNA containing a 5′ KpnI site followed by a start Methionine codon, 11 Arginine codons, the cDNA for the mitochondrially localized RFP ending in a 3′ BgIII site. The cDNA construct was digested with KpnI and BgIII and cloned into pThio-gpD digested with KpnI and BgIII. The resultant plasmid was named pEXP-TMRD (Expression plasmid for Transducing Mitochondrial Red fluorescent protein gpD) (FIG. 1C).

[0141] pEXP-TMRD was used to transform DH5Ã cells. Colonies were isolated and sequenced for the proper plasmid. The colony containing the correct construct was grown in 10 milliliter culture to an optical density value of 0.5. IPTG was added to 1 mM to induce expression of the TMRD protein. The culture was incubated for 4 hours in a 37° C. shaking incubator. The bacterial culture was centrifuged and the resulting pellet frozen overnight at −80 C. The pellet was resuspended in 5 ml BPER lysis reagent (Pierce). Lysozyme, 100 ul of 10 mg/ml stock solution (Pierce), was added to the suspension to a final concentration of 200 ug/ml. The resultant mixture was incubated at room temperature for 5 minutes. 15 ml of 1:10 diluted BPER reagent were added to the suspension, and mixed by vortexing. In order to collect the inclusion bodies containing the TMRD protein, centrifugation at 27,000 g was done for 15 minutes. The pellet was resuspended in 20 ml of 1:10 diluted BPER Reagent. The centrifugation and pellet resuspension steps were repeated two more times. The inclusion bodies were solubilized with 7 M urea, 1 mM DTT, 50 mM Tris.HCl (pH 8.0), and 150 mM NaCl. The solubilized inclusion bodies were dialyzed against saline containing 33% PBS overnight. Further purification was carried out using the HisPatch Thiofusion S.N.A.P. purification columns (Invitrogen) following manufacture's directions. The resulting protein concentrate was incubated with enterokinase at 1 mg/ml overnight at room temperature. Protein concentration was quantified with the Lowry assay (Biorad). Purified TMRD was introduced into the GigaPack Gold packaging extract (Stratagene) to a final concentration of 0.5 mg/ml. The final lambda packaging extract containing TMRD in excess was used immediately.

### Example 2

Transfection of Mitochondria in Living Cells and Expression of a Recombinant Gene Construct

[0142] Through PCR, a full-length mitochondrial genome using established primers to amplify the entire mitochondrial genome sequence of Sy5y cells was generated. The full-length mtDNA was digested with BgIII and NotI. Once digested, a NotI, BgIII digested GFP was ligated to mtDNA amplicon. To this larger molecule, the Cos sites were ligated to generate a packageable construct. The cloning strategy is outlined below.

[0143] A full length mtDNA PCR amplicon is generated with sense and anti-sense primers containing internal BgIII and NotI sites, respectively, and digested with BgIII and NotI (FIG. 2A). A GFP DNA will be excised from its vector, pEGFP-1, using BgIII and NotI sites. This GFP construct will be ligated to the mtDNA amplicon generated by PCR and digested. The resulting molecule may contain both 5′ and 3′ sense GFPs (FIG. 2B).

[0144] A GFP that has been mutated to be expressed only in mitochondria was used. Briefly, the 60th codon of the GFP mRNA is a UGG—it is read as a tryptophan by both the nuclear and mitochondrial translation apparatus. By mutating this codon to a UGA generates a stop if translated by the nucleus, but is translated as a tryptophan in the mitochondria. This strategy takes advantage of the difference between mitochondrial and nuclear codons producing a curtailed non-fluorescing protein if translated in the ER otherwise producing a full length GFP in the mitochondria. This GFP construct was ligated to the full length mtDNA amplicon (FIG. 3).

[0145] Once the construct illustrated in FIG. 3 was packaged with packaging extract including the recombinant PTD-organelle targeting signal capsid protein, the active phage particles were introduced into the extracellular media of cells devoid of mtDNA generated with RNAi. Since the recombinant capsid protein contains a reporter gene, RFP, confocal microscopy was used to follow and verify the location of the recombinant viral vector (FIG. 4). The 40-minute micrograph includes mitochondria specific dye, Mitotracker Green (Molecular Probes) to verify mitochondrial localization.

[0146] Mitochondrial targeting was further verified with western blotting of mitochondrial fractions generated at specific time points using antibodies to RFP (Clontech) and Cytochrome C (Pharmingen) (FIG. 5). A mitochondrial fraction was prepared from Sy5y cells in culture at several time points after introducing the modified bacteriophage lambda viral vector and immunoblotted with an anti-RFP antibody (Clontech). The same mitochondrial fractions that contained an anti-RFP signal were probed with an anti-body for cytochrome C, an endogenous mitochondrial matrix protein. RFP immunoblot showing isolated (Control) TMRD and 0, 10, 20, 25, 30, and 35 minutes after introduction of the modified lambda viral vector into the cellular media. These blots indicate that the viral vector was able to cross the cellular and mitochondrial membranes, reaching the mitochondrial inner matrix. Cytochrome C immunoblot from the 10, 20, 25, 30, and 35 minute mitochondrial fractions positive for RFP.

[0147] FIG. 6A shows the successful introduction of lambdaphage targeted to mitochondria. FIG. 6A shows GFP message in mitochondria (demonstrated with RT-PCR). This approach yields very efficient GFP expression in mitochondria, shown by the correlation graph in FIG. 6d. Thus successfully demonstrated the ability of the technology to reintroduce intact mitochondrial genomes into rho⁰ SY5Y cells. FIG. 6B shows (a) appearance of ρ0 cells 24 hours after transfection with RFP recombinant phage; (b) appearance of ρ0 cells transfected with SuperCos-1/mtDNA/GFP recombinant phage construct under green fluoresence after 24 hours; (c) companion images of MitoTracker Red staining (c) to reveal location of mitochondria. Panel (d) is a scatterplot comparing fluorescence intensities among MitoTracker Red mitochondrial clusters and GFP reporter gene expression.

### Example 3

siRNA Knockdown of PolG

[0148] RNA interference (RNAi) is based on an evolutionarily conserved mechanism to prevent replication and expression of exogenous double-stranded RNA. While initially described in plants, RNAi has now been described in eukaryotic, vertebrate, and mammalian cells. The basic mechanism depends on the generation of small RNA duplexes of 21-23 nucleotides in length and with 2-3 nucleotide overhangs at each end. In cells infected with exogenous RNA viruses, these small interfering RNA's (siRNA's) are produced by the action of a RNAase complex known as “dicer”. The siRNA's thus generated (or supplied as exogenous duplexes or generated internally from vectors) then form an RNA—induced silencing complex (RISC), which utilizes the anti-sense RNA strand to hybridize to the specific mRNA gene product. RISC then can create a new RNA duplex that dicer or perhaps RISC itself can degrade.

[0149] RNA silencing of mitochondrial polymerase POIG occurs within 3 days. Rho⁰ cell lines were created by chronic incubation with the mutagen ethidium bromide to provide a slow mutagenesis and depletion of mtDNA. To develop more useful cell lines, a molecular RNA interference approach to silence the POIG gene was utilized and described here for the first time. The results of this experiment are shown in FIG. 7. RNA silencing of the POLG gene. (top) Locations of unique sequences in POL-γ mRNA chosen for RNA duplex construction. Three different duplexes were synthesized and tested. (bottom) complete loss of GFP fluorescence over 72 hrs after lipofection of RNA duplexes, indirectly indicating silencing of POLG.

[0150] The PolG gene (SEQ ID NO.: 195) was examined and several apparently unique sequences were defined to create appropriate siRNA duplexes and exemplary target sequences and siRNA sequences are provided in Table 3. Representative siRNAs were introduced by lipophilic amine into cells transfected with the recombinant lambda vector. Because mtDNA synthesis and transcription are so closely linked, the loss of GFP signal was followed as a marker for loss of PolG activity (FIG. 7).

TABLE 3
PoIG siRNA Sequences

| | |
|---|---|
| Target sequence 1: AAGGTGGCCGGCGCCACCGTC | (SEQ ID NO. 196) |
| Position in gene sequence: 22 | |
| GC content: 76.2% | |
| Sense strand siRNA: GGUGGCCGGCGCCACCGUCtt | (SEQ ID NO. 197) |
| Antisense strand siRNA: GACGGUGGCGCCGGCCACCtt | (SEQ ID NO. 198) |
| Target sequence 2: AACAGCAGCCTCAGCAGCCGC | (SEQ ID NO. 199) |
| Position in gene sequence: 158 | |
| GC content: 66.7% | |
| Sense strand siRNA: CAGCAGCCUCAGCAGCCGCtt | (SEQ ID NO. 200) |
| Antisense strand siRNA: GCGGCUGCUGAGGCUGCUGtt | (SEQ ID NO. 201) |
| Target sequence 3: AAGTGCTATCCTCGGAGGGCG | (SEQ ID NO. 202) |
| Position in gene sequence: 179 | |
| GC content: 61.9% | |
| Sense strand siRNA: GUGCUAUCCUCGGAGGGCGtt | (SEQ ID NO. 203) |
| Antisense strand siRNA: CGCCCUCCGAGGAUAGCACtt | (SEQ ID NO. 204) |
| Target sequence 4: AACCCATTGGACATCCAGATG | (SEQ ID NO. 205) |
| Position in gene sequence: 214 | |
| GC content: 47.6% | |
| Sense strand siRNA: CCCAUUGGACAUCCAGAUGtt | (SEQ ID NO. 206) |
| Antisense strand siRNA: CAUCUGGAUGUCCAAUGGGtt | (SEQ ID NO. 207) |
| Target sequence 5: AAATCTTCGGGCAAGGAGGGG | (SEQ ID NO. 208) |
| Position in gene sequence: 257 | |
| GC content: 57.1% | |
| Sense strand siRNA: AUCUUCGGGCAAGGAGGGGtt | (SEQ ID NO. 209) |
| Antisense strand siRNA: CCCCUCCUUGCCCGAAGAUtt | (SEQ ID NO. 210) |
| Target sequence 6: AAGGAGGGGAGATGCCTGGCG | (SEQ ID NO. 211) |
| Position in gene sequence: 269 | |
| GC content: 66.7% | |
| Sense strand siRNA: GGAGGGGAGAUGCCUGGCGtt | (SEQ ID NO. 212) |
| Antisense strand siRNA: CGCCAGGCAUCUCCCCUCCtt | (SEQ ID NO. 213) |
| Target sequence 7: AAGCACGGGCTCTGGGGGCAG | (SEQ ID NO. 214) |
| Position in gene sequence: 325 | |
| GC content: 71.4% | |
| Sense strand siRNA: GCACGGGCUCUGGGGGCAGtt | (SEQ ID NO. 215) |
| Antisense strand siRNA: CUGCCCCCAGAGCCCGUGCtt | (SEQ ID NO. 216) |
| Target sequence 8: AACCTGGACCAGCACTTCCGC | (SEQ ID NO. 217) |
| Position in gene sequence: 400 | |
| GC content: 61.9% | |
| Sense strand siRNA: CCUGGACCAGCACUUCGGCtt | (SEQ ID NO. 218) |
| Antisense strand siRNA: GCGGAAGUGCUGGUCCAGGtt | (SEQ ID NO. 219) |
| Target sequence 9: AAGCAGAGCCTGCCCTACCTG | (SEQ ID NO. 220) |
| Position in gene sequence: 433 | |
| GC content: 61.9% | |
| Sense strand siRNA: GCAGAGCCUGCCCUACCUGtt | (SEQ ID NO. 221) |
| Antisense strand siRNA: CAGGUAGGGCAGGCUCUGCtt | (SEQ ID NO. 222) |
| Target sequence 10: AACTTGCTGTTGCAGGCCCAG | (SEQ ID NO. 223) |
| Position in gene sequence: 463 | |
| GC content: 57.1% | |
| Sense strand siRNA: CUUGCUGUUGCAGGCCCAGtt | (SEQ ID NO. 224) |
| Antisense strand siRNA: CUGGGCCUGCAACAGCAAGtt | (SEQ ID NO. 225) |
| Target sequence 11: AAGCCCCCGGCTTGGGCCTGG | (SEQ ID NO. 226) |
| Position in gene sequence: 493 | |
| GC content: 76.2% | |
| Sense strand siRNA: GCCCCCGGCUUGGGCCUGGtt | (SEQ ID NO. 227) |
| Antisense strand siRNA: CCAGGCCCAAGCCGGGGGCtt | (SEQ ID NO. 228) |
| Target sequence 12: AACTTGCCCCACATTGGCGGT | (SEQ ID NO. 229) |
| Position in gene sequence: 618 | |
| GC content: 57.1% | |
| Sense strand siRNA: CUUGCCCCACAUUGGCGGUtt | (SEQ ID NO. 230) |
| Antisense strand siRNA: ACCGCCAAUGUGGGGCAAGtt | (SEQ ID NO. 231) |
| Target sequence 13: AAGAGCGTTACTCTTGGACCA | (SEQ ID NO. 232) |
| Position in gene sequence: 689 | |
| GC content: 47.6% | |
| Sense strand siRNA: GAGCGUUACUCUUGGACCAtt | (SEQ ID NO. 233) |
| Antisense strand siRNA: UGGUCCAAGAGUAACGCUCtt | (SEQ ID NO. 234) |
| Target sequence 14: AATGTTTCCTTTGACCGAGCT | (SEQ ID NO. 235) |
| Position in gene sequence: 808 | |
| GC content: 42.9% | |
| Sense strand siRNA: UGUUUCCUUUGACCGAGCUtt | (SEQ ID NO. 236) |
| Antisense strand siRNA: AGCUCGGUCAAAGGAAACAtt | (SEQ ID NO. 237) |
| Target sequence 15: AAGCAGCTTCCAGCGCAGTCT | (SEQ ID NO. 238) |
| Position in gene sequence: 912 | |
| GC content: 57.1% | |
| Sense strand siRNA: GCAGCUUCCAGCGCAGUCUtt | (SEQ ID NO. 239) |
| Antisense strand siRNA: AGACUGCGCUGGAAGCUGCtt | (SEQ ID NO. 240) |
| Target sequence 16: AAGCAGGGCAAACACAAGGTC | (SEQ ID NO. 241) |
| Position in gene sequence: 946 | |
| GC content: 52.4% | |
| Sense strand siRNA: GCAGGGCAAACACAAGGUCtt | (SEQ ID NO. 242) |
| Antisense strand siRNA: GACCUUGUGUUUGCCCUGCtt | (SEQ ID NO. 243) |
| Target sequence 17: AAACACAAGGTCCAGCCCCCC | (SEQ ID NO. 244) |
| Position in gene sequence: 955 | |
| GC content: 61.9% | |
| Sense strand siRNA: ACACAAGGUCCAGCCCCCCtt | (SEQ ID NO. 245) |
| Antisense strand siRNA: GGGGGGCUGGACCUUGUGUtt | (SEQ ID NO. 246) |
| Target sequence 18: AAGGTCCAGCCCCCCACAAAG | (SEQ ID NO. 247) |
| Position in gene sequence: 961 | |
| GC content: 61.9% | |
| Sense strand siRNA: GGUCCAGCCCCCCACAAAGtt | (SEQ ID NO. 248) |
| Antisense strand siRNA: CUUUGUGGGGGGCUGGACCtt | (SEQ ID NO. 249) |
| Target sequence 19: AAAGCAAGGCCAGAAGTCCCA | (SEQ ID NO. 250) |
| Position in gene sequence: 978 | |
| GC content: 52.4% | |
| Sense strand siRNA: AGCAAGGCCAGAAGUCCCAtt | (SEQ ID NO. 251) |
| Antisense strand siRNA: UGGGACUUCUGGCCUUGCUtt | (SEQ ID NO. 252) |
| Target sequence 20: AAGGCCAGAAGTCCCAGAGGA | (SEQ ID NO. 253) |
| Position in gene sequence: 983 | |
| GC content: 57.1% | |
| Sense strand siRNA: GGCCAGAAGUCCCAGAGGAtt | (SEQ ID NO. 254) |
| Antisense strand siRNA: UCCUCUGGGACUUCUGGCCtt | (SEQ ID NO. 255) |
| Target sequence 21: AAGTCCCAGAGGAAAGCCAGA | (SEQ ID NO. 256) |
| Position in gene sequence: 991 | |
| GC content: 52.4% | |
| Sense strand siRNA: GUCCCAGAGGAAAGCCAGAtt | (SEQ ID NO. 257) |
| Antisense strand siRNA: UCUGGCUUUCCUCUGGGACtt | (SEQ ID NO. 258) |
| Target sequence 22: AAAGCCAGAAGAGGCCCAGCG | (SEQ ID NO. 259) |
| Position in gene sequence: 1003 | |
| GC content: 61.9% | |
| Sense strand siRNA: AGCCAGAAGAGGCCCAGCGtt | (SEQ ID NO. 260) |
| Antisense strand siRNA: CGCUGGGCCUCUUCUGGCUtt | (SEQ ID NO. 261) |
| Target sequence 23: AAGAGGCCCAGCGATCTCATC | (SEQ ID NO. 262) |
| Position in gene sequence: 1011 | |
| GC content: 57.1% | |
| Sense strand siRNA: GAGGCCCAGCGAUCUCAUCtt | (SEQ ID NO. 263) |
| Antisense strand siRNA: GAUGAGAUCGCUGGGCCUCtt | (SEQ ID NO. 264) |
| Target sequence 24: AACAGTCTGGCAGAGGTGCAC | (SEQ ID NO. 265) |
| Position in gene sequence: 1060 | |
| GC content: 57.1% | |
| Sense strand siRNA: CAGUCUGGCAGAGGUGCACtt | (SEQ ID NO. 266) |
| Antisense strand siRNA: GUGCACCUCUGCCAGACUGtt | (SEQ ID NO. 267) |
| Target sequence 25: AAGGAGCCTCGAGAACTGTTT | (SEQ ID NO. 268) |
| Position in gene sequence: 1111 | |
| GC content: 47.6% | |
| Sense strand siRNA: GGAGCCUCGAGAACUGUUUtt | (SEQ ID NO. 269) |
| Antisense strand siRNA: AAACAGUUCUCGAGGCUCCtt | (SEQ ID NO. 270) |
| Target sequence 26: AACTGTTTGTGAAGGGCACCA | (SEQ ID NO. 271) |
| Position in gene sequence: 1124 | |
| GC content: 47.6% | |
| Sense strand siRNA: CUGUUUGUGAAGGGCACCAtt | (SEQ ID NO. 272) |
| Antisense strand siRNA: UGGUGCCCUUCACAAACAGtt | (SEQ ID NO. 273) |
| Target sequence 27: AAGGGCACCATGAAGGACATT | (SEQ ID NO. 274) |
| Position in gene sequence: 1135 | |
| GC content: 47.6% | |
| Sense strand siRNA: GGGCACCAUGAAGGACAUUtt | (SEQ ID NO. 275) |
| Antisense strand siRNA: AAUGUCCUUCAUGGUGCCCtt | (SEQ ID NO. 276) |
| Target sequence 28: AAGGACATTCGTGAGAACTTC | (SEQ ID NO. 277) |
| Position in gene sequence: 1147 | |
| GC content: 42.9% | |
| Sense strand siRNA: GGACAUUCGUGAGAACUUCtt | (SEQ ID NO. 278) |
| Antisense strand siRNA: GAAGUUCUCACGAAUGUCCtt | (SEQ ID NO. 279) |
| Target sequence 29: AACTTCCAGGACCTGATGCAG | (SEQ ID NO. 280) |
| Position in gene sequence: 1162 | |
| GC content: 52.4% | |
| Sense strand siRNA: CUUCCAGGACCUGAUGCAGtt | (SEQ ID NO. 281) |
| Antisense strand siRNA: CUGCAUCAGGUCCUGGAAGtt | (SEQ ID NO. 282) |
| Target sequence 30: AACCAGAACTGGGAGCGTTAC | (SEQ ID NO. 283) |
| Position in gene sequence: 1312 | |
| GC content: 52.4% | |
| Sense strand siRNA: CCAGAACUGGGAGCGUUACtt | (SEQ ID NO. 284) |
| Antisense strand siRNA: GUAACGCUCCCAGUUCUGGtt | (SEQ ID NO. 285) |
| Target sequence 31: AACTGGGAGCGTTACCTGGCA | (SEQ ID NO. 286) |
| Position in gene sequence: 1318 | |
| GC content: 57.1% | |
| Sense strand siRNA: CUGGGAGCGUUACCUGGCAtt | (SEQ ID NO. 287) |
| Antisense strand siRNA: UGCCAGGUAACGCUCCCAGtt | (SEQ ID NO. |
| | (SEQ ID NO. 288) |
| Target sequence 32: AAGAAGTCGTTGATGGATCTG | (SEQ ID NO. 289) |
| Position in gene sequence: 1378 | |
| GC content: 42.9% | |
| Sense strand siRNA: GAAGUCGUUGAUGGAUCUGtt | (SEQ ID NO. 290) |
| Antisense strand siRNA: CAGAUCCAUCAACGACUUCtt | (SEQ ID NO. 291) |
| Target sequence 33: AAGTCGTTGATGGATCTGGCC | (SEQ ID NO. 292) |
| Position in gene sequence: 1381 | |
| GC content: 52.4% | |
| Sense strand siRNA: GUCGUUGAUGGAUCUGGCCtt | (SEQ ID NO. 293) |
| Antisense strand siRNA: GGCCAGAUCCAUCAACGACtt | (SEQ ID NO. 294) |
| Target sequence 34: AATGATGCCTGCCAGCTGCTC | (SEQ ID NO. 295) |
| Position in gene sequence: 1402 | |
| GC content: 57.1% | |
| Sense strand siRNA: UGAUGCCUGCCAGCUGCUCtt | (SEQ ID NO. 296) |
| Antisense strand siRNA: GAGCAGCUGGCAGGCAUCAtt | (SEQ ID NO. 297) |
| Target sequence 35: AAAGAAGACCCCTGGCTCTGG | (SEQ ID NO. 298) |
| Position in gene sequence: 1438 | |
| GC content: 57.1% | |
| Sense strand siRNA: AGAAGACCCCUGGCUCUGGtt | (SEQ ID NO. 299) |
| Antisense strand siRNA: CCAGAGCCAGGGGUCUUCUtt | (SEQ ID NO. 300) |
| Target sequence 36: AAGACCCCTGGCTCTGGGACC | (SEQ ID NO. 301) |
| Position in gene sequence: 1442 | |
| GC content: 66.7% | |
| Sense strand siRNA: GACCCCUGGCUCUGGGACCtt | (SEQ ID NO. 302) |
| Antisense strand siRNA: GGUCCCAGAGCCAGGGGUCtt | (SEQ ID NO. 303) |
| Target sequence 37: AAGAATTTAAGCAGAAGAAAG | (SEQ ID NO. 304) |
| Position in gene sequence: 1478 | |
| GC content: 28.6% | |
| Sense strand siRNA: GAAUUUAAGCAGAAGAAAGtt | (SEQ ID NO. 305) |
| Antisense strand siRNA: CUUUCUUCUGCUUAAAUUCtt | (SEQ ID NO. 306) |
| Target sequence 38: AATTTAAGCAGAAGAAAGCTA | (SEQ ID NO. 307) |
| Position in gene sequence: 1481 | |
| GC content: 28.6% | |
| Sense strand siRNA: UUUAAGCAGAAGAAAGCUAtt | (SEQ ID NO. 308) |
| Antisense strand siRNA: UAGCUUUCUUCUGCUUAAAtt | (SEQ ID NO. 309) |
| Target sequence 39: AAGCAGAAGAAAGCTAAGAAG | (SEQ ID NO. 310) |
| Position in gene sequence: 1486 | |
| GC content: 38.1% | |
| Sense strand siRNA: GCAGAAGAAAGCUAAGAAGtt | (SEQ ID NO. 311) |
| Antisense strand siRNA: CUUCUUAGCUUUCUUCUGCtt | (SEQ ID NO. 312) |
| Target sequence 40: AAGAAAGCTAAGAAGGTGAAG | (SEQ ID NO. 313) |
| Position in gene sequence: 1492 | |
| GC content: 38.1% | |
| Sense strand siRNA: GAAAGCUAAGAAGGUGAAGtt | (SEQ ID NO. 314) |
| Antisense strand siRNA: CUUCACCUUCUUAGCUUUCtt | (SEQ ID NO. 315) |
| Target sequence 41: AAAGCTAAGAAGGTGAAGAAG | (SEQ ID NO. 316) |
| Position in gene sequence: 1495 | |
| GC content: 38.1% | |
| Sense strand siRNA: AGCUAAGAAGGUGAAGAAGtt | (SEQ ID NO. 317) |
| Antisense strand siRNA: CUUCUUCACCUUCUUAGCUtt | (SEQ ID NO. 318) |
| Target sequence 42: AAGAAGGTGAAGAAGGAACCA | (SEQ ID NO. 319) |
| Position in gene sequence: 1501 | |
| GC content: 42.9% | |
| Sense strand siRNA: GAAGGUGAAGAAGGAACCAtt | (SEQ ID NO. 320) |
| Antisense strand siRNA: UGGUUCCUUCUUCACCUUCtt | (SEQ ID NO. 321) |
| Target sequence 43: AAGGTGAAGAAGGAACCAGCC | (SEQ ID NO. 322) |
| Position in gene sequence: 1504 | |
| GC content: 52.4% | |
| Sense strand siRNA: GGUGAAGAAGGAACCAGCCtt | (SEQ ID NO. 323) |
| Antisense strand siRNA: GGCUGGUUCCUUCUUCACCtt | (SEQ ID NO. 324) |
| Target sequence 44: AAGAAGGAACCAGCCACAGCC | (SEQ ID NO. 325) |
| Position in gene sequence: 1510 | |
| GC content: 57.1% | |
| Sense strand siRNA: GAAGGAACCAGCCACAGCCtt | (SEQ ID NO. 326) |
| Antisense strand siRNA: GGCUGUGGCUGGUUCCUUCtt | (SEQ ID NO. 327) |
| Target sequence 45: AAGGAACCAGCCACAGCCAGC | (SEQ ID NO. 328) |
| Position in gene sequence: 1513 | |
| GC content: 61.9% | |
| Sense strand siRNA: GGAACCAGCCACAGCCAGCtt | (SEQ ID NO. 329) |
| Antisense strand siRNA: GCUGGCUGUGGCUGGUUCCtt | (SEQ ID NO. 330) |
| Target sequence 46: AACCAGCCACAGCCAGCAAGT | (SEQ ID NO. 331) |
| Position in gene sequence: 1517 | |
| GC content: 57.1% | |
| Sense strand siRNA: CCAGCCACAGCCAGCAAGUtt | (SEQ ID NO. 332) |
| Antisense strand siRNA: ACUUGCUGGCUGUGGCUGGtt | (SEQ ID NO. 333) |
| Target sequence 47: AAGTTGCCCATCGAGGGGGCT | (SEQ ID NO. 334) |
| Position in gene sequence: 1534 | |
| GC content: 61.9% | |
| Sense strand siRNA: GUUGCCCAUCGAGGGGGCUtt | (SEQ ID NO. 335) |
| Antisense strand siRNA: AGCCCCCUCGAUGGGCAACtt | (SEQ ID NO. 336) |
| Target sequence 48: AAGACCTCGGCCCCTGCAGTG | (SEQ ID NO. 337) |
| Position in gene sequence: 1583 | |
| GC content: 66.7% | |
| Sense strand siRNA: GACCUCGGCCCCUGCAGUGtt | (SEQ ID NO. 338) |
| Antisense strand siRNA: CACUGCAGGGGCCGAGGUCtt | (SEQ ID NO. 339) |
| Target sequence 49: AACAAGATGTCATGGCCCGCG | (SEQ ID NO. 340) |
| Position in gene sequence: 1619 | |
| GC content: 57.1% | |
| Sense strand siRNA: CAAGAUGUCAUGGCCCGCGtt | (SEQ ID NO. 341) |
| Antisense strand siRNA: CGCGGGCCAUGACAUCUUGtt | (SEQ ID NO. 342) |
| Target sequence 50: AAGATGTCATGGCCCGCGCCT | (SEQ ID NO. 343) |
| Position in gene sequence: 1622 | |
| GC content: 61.9% | |
| Sense strand siRNA: GAUGUCAUGGCCCGCGCCUtt | (SEQ ID NO. 344) |
| Antisense strand siRNA: AGGCGCGGGCCAUGACAUCtt | (SEQ ID NO. 345) |
| Target sequence 51: AAGCTGAAGGGGACCACAGAG | (SEQ ID NO. 346) |
| Position in gene sequence: 1651 | |
| GC content: 57.1% | |
| Sense strand siRNA: GCUGAAGGGGACCACAGAGtt | (SEQ ID NO. 347) |
| Antisense strand siRNA: CUCUGUGGUCCCCUUCAGCtt | (SEQ ID NO. 348) |
| Target sequence 52: AAGGGGACCACAGAGCTCCTG | (SEQ ID NO. 349) |
| Position in gene sequence: 1657 | |
| GC content: 61.9% | |
| Sense strand siRNA: GGGGACCACAGAGCUCCUGtt | (SEQ ID NO. 350) |
| Antisense strand siRNA: CAGGAGCUCUGUGGUCCCCtt | (SEQ ID NO. 351) |
| Target sequence 53: AAGCGGCCCCAGCACCTTCCT | (SEQ ID NO. 352) |
| Position in gene sequence: 1681 | |
| GC content: 66.7% | |
| Sense strand siRNA: GCGGCCCCAGCACCUUCCUtt | (SEQ ID NO. 353) |
| Antisense strand siRNA: AGGAAGGUGCUGGGGCCGCtt | (SEQ ID NO. 354) |
| Target sequence 54: AAGCTCTGCCCCCGGCTAGAC | (SEQ ID NO. 355) |
| Position in gene sequence: 1723 | |
| GC content: 66.7% | |
| Sense strand siRNA: GCUCUGCCCCCGGCUAGACtt | (SEQ ID NO. 356) |
| Antisense strand siRNA: GUCUAGCCGGGGGCAGAGCtt | (SEQ ID NO. 357) |
| Target sequence 55: AAACTCATGGCACTTACCTGG | (SEQ ID NO. 358) |
| Position in gene sequence: 1801 | |
| GC content: 47.6% | |
| Sense strand siRNA: ACUCAUGGCACUUACCUGGtt | (SEQ ID NO. 359) |
| Antisense strand siRNA: CCAGGUAAGUGCCAUGAGUtt | (SEQ ID NO. 360) |
| Target sequence 56: AACCTGGCCAAGCTGCCGACA | (SEQ ID NO. 361) |
| Position in gene sequence: 1888 | |
| GC content: 61.9% | |
| Sense strand siRNA: CCUGGCCAAGCUGCCGACAtt | (SEQ ID NO. 362) |
| Antisense strand siRNA: UGUCGGCAGCUUGGCCAGGtt | (SEQ ID NO. 363) |
| Target sequence 57: AAGCTGCCGACAGGTACCACC | (SEQ ID NO. 364) |
| Position in gene sequence: 1897 | |
| GC content: 61.9% | |
| Sense strand siRNA: GCUGCCGACAGGUACCACCtt | (SEQ ID NO. 365) |
| Antisense strand siRNA: GGUGGUACCUGUCGGCAGCtt | (SEQ ID NO. 366) |
| Target sequence 58: AAGCACTGTCTCGAACAGGGG | (SEQ ID NO. 367) |
| Position in gene sequence: 1972 | |
| GC content: 57.1% | |
| Sense strand siRNA: GCACUGUCUGGAACAGGGGtt | (SEQ ID NO. 368) |
| Antisense strand siRNA: CCCCUGUUCGAGACAGUGCtt | (SEQ ID NO. 369) |
| Target sequence 59: AACAGGGGAAGCAGCAGCTGA | (SEQ ID NO. 370) |
| Position in gene sequence: 1985 | |
| GC content: 57.1% | |
| Sense strand siRNA: CAGGGGAAGCAGCAGCUGAtt | (SEQ ID NO. 371) |
| Antisense strand siRNA: UCAGCUGCUGCUUCCCCUGtt | (SEQ ID NO. 372) |
| Target sequence 60: AAGCAGCAGCTGATGCCCCAG | (SEQ ID NO. 373) |
| Position in gene sequence: 1993 | |
| GC content: 61.9% | |
| Sense strand siRNA: GCAGCAGCUGAUGCCCCAGtt | (SEQ ID NO. 374) |
| Antisense strand siRNA: CUGGGGCAUCAGCUGCUGCtt | (SEQ ID NO. 375) |
| Target sequence 61: AATAGTGCCATATGGCAAACG | (SEQ ID NO. 376) |
| Position in gene sequence: 2050 | |
| GC content: 42.9% | |
| Sense strand siRNA: UAGUGCCAUAUGGCAAACGtt | (SEQ ID NO. 377) |
| Antisense strand siRNA: CGUUUGCCAUAUGGCACUAtt | (SEQ ID NO. 378) |
| Target sequence 62: AAACGGTAGAAGAACTGGATT | (SEQ ID NO. 379) |
| Position in gene sequence: 2066 | |
| GC content: 38.1% | |
| Sense strand siRNA: ACGGUAGAAGAACUGGAUUtt | (SEQ ID NO. 380) |
| Antisense strand siRNA: AAUCCAGUUCUUCUACCGUtt | (SEQ ID NO. 381) |
| Target sequence 63: AAGAACTGGATTACTTAGAAG | (SEQ ID NO. 382) |
| Position in gene sequence: 2075 | |
| GC content: 33.3% | |
| Sense strand siRNA: GAACUGGAUUACUUAGAAGtt | (SEQ ID NO. 383) |
| Antisense strand siRNA: CUUCUAAGUAAUCCAGUUCtt | (SEQ ID NO. 384) |
| Target sequence 64: AACTGGATTACTTAGAAGTGG | (SEQ ID NO. 385) |
| Position in gene sequence: 2078 | |
| GC content: 38.1% | |
| Sense strand siRNA: CUGGAUUACUUAGAAGUGGtt | (SEQ ID NO. 386) |
| Antisense strand siRNA: CCACUUCUAAGUAAUCCAGtt | (SEQ ID NO. 387) |
| Target sequence 65: AAGTGGAGGCTGAGGCCAAGA | (SEQ ID NO. 388) |
| Position in gene sequence: 2093 | |
| GC content: 57.1% | |
| Sense strand siRNA: GUGGAGGCUGAGGCCAAGAtt | (SEQ ID NO. 389) |
| Antisense strand siRNA: UCUUGGCCUCAGCCUCCACtt | (SEQ ID NO. 390) |
| Target sequence 66: AAGATGGAGAACTTGCGAGCT | (SEQ ID NO. 391) |
| Position in gene sequence: 2110 | |
| GC content: 47.6% | |
| Sense strand siRNA: GAUGGAGAACUUGCGAGCUtt | (SEQ ID NO. 392) |
| Antisense strand siRNA: AGCUCGCAAGUUCUCCAUCtt | (SEQ ID NO. 393) |
| Target sequence 67: AACTTGCGAGCTGCAGTGCCA | (SEQ ID NO. 394) |
| Position in gene sequence: 2119 | |
| GC content: 57.1% | |
| Sense strand siRNA: CUUGCGAGCUGCAGUGCCAtt | (SEQ ID NO. 395) |
| Antisense strand siRNA: UGGCACUGCAGCUCGCAAGtt | (SEQ ID NO. 396) |
| Target sequence 68: AACCCCTAGCTCTGACTGCCC | (SEQ ID NO. 397) |
| Position in gene sequence: 2144 | |
| GC content: 61.9% | |
| Sense strand siRNA: CCCCUAGCUCUGACUGCCCtt | (SEQ ID NO. 398) |
| Antisense strand siRNA: GGGCAGUCAGAGCUAGGGGtt | (SEQ ID NO. 399) |
| Target sequence 69: AAGGACACCCAGCCCAGCTAT | (SEQ ID NO. 400) |
| Position in gene sequence: 2176 | |
| GC content: 57.1% | |
| Sense strand siRNA: GGACACCCAGCCCAGCUAUtt | (SEQ ID NO. 401) |
| Antisense strand siRNA: AUAGCUGGGCUGGGUGUCCtt | (SEQ ID NO. 402) |
| Target sequence 70: AATGGACCTTACAACGACGTG | (SEQ ID NO. 403) |
| Position in gene sequence: 2206 | |
| GC content: 47.6% | |
| Sense strand siRNA: UGGACCUUACAACGACGUGtt | (SEQ ID NO. 404) |
| Antisense strand siRNA: CACGUCGUUGUAAGGUCCAtt | (SEQ ID NO. 405) |
| Target sequence 71: AACGACGTGGACATCCCTGGC | (SEQ ID NO. 406) |
| Position in gene sequence: 2218 | |
| GC content: 61.9% | |
| Sense strand siRNA: CGACGUGGACAUCCCUGGCtt | (SEQ ID NO. 407) |
| Antisense strand siRNA: GCCAGGGAUGUCCACGUCGtt | (SEQ ID NO. 408) |
| Target sequence 72: AAGCTGCCTCACAAGGATGGT | (SEQ ID NO. 409) |
| Position in gene sequence: 2251 | |
| GC content: 52.4% | |
| Sense strand siRNA: GCUGCCUCACAAGGAUGGUtt | (SEQ ID NO. 410) |
| Antisense strand siRNA: ACCAUCCUUGUGAGGCAGCtt | (SEQ ID NO. 411) |
| Target sequence 73: AAGGATGGTAATAGCTGTAAT | (SEQ ID NO. 412) |
| Position in gene sequence: 2263 | |
| GC content: 33.3% | |
| Sense strand siRNA: GGAUGGUAAUAGCUGUAAUtt | (SEQ ID NO. 413) |
| Antisense strand siRNA: AUUACAGCUAUUACCAUCCtt | (SEQ ID NO. 414) |
| Target sequence 74: AATAGCTGTAATGTGGGAAGC | (SEQ ID NO. 415) |
| Position in gene sequence: 2272 | |
| GC content: 42.9% | |
| Sense strand siRNA: UAGCUGUAAUGUGGGAAGCtt | (SEQ ID NO. 416) |
| Antisense strand siRNA: GCUUCCCACAUUACAGCUAtt | (SEQ ID NO. 417) |
| Target sequence 75: AATGTGGGAAGCCCCTTTGCC | (SEQ ID NO. 418) |
| Position in gene sequence: 2281 | |
| GC content: 57.1% | |
| Sense strand siRNA: UGUGGGAAGCCCCUUUGCCtt | (SEQ ID NO. 419) |
| Antisense strand siRNA: GGCAAAGGGGCUUCCCACAtt | (SEQ ID NO. 420) |
| Target sequence 76: AAGCCCCTTTGCCAAGGACTT | (SEQ ID NO. 421) |
| Position in gene sequence: 2289 | |
| GC content: 52.4% | |
| Sense strand siRNA: GCCCCUUUGCCAAGGACUUtt | (SEQ ID NO. 422) |
| Antisense strand siRNA: AAGUCCUUGGCAAAGGGGCtt | (SEQ ID NO. 423) |
| Target sequence 77: AAGGACTTCCTGCCCAAGATG | (SEQ ID NO. 424) |
| Position in gene sequence: 2302 | |
| GC content: 52.4% | |
| Sense strand siRNA: GGACUUCCUGCCCAAGAUGtt | (SEQ ID NO. 425) |
| Antisense strand siRNA: CAUCUUGGGCAGGAAGUCCtt | (SEQ ID NO. 426) |
| Target sequence 78: AAGATGGAGGATGGCACCCTG | (SEQ ID NO. 427) |
| Position in gene sequence: 2317 | |
| GC content: 57.1% | |
| Sense strand siRNA: GAUGGAGGAUGGCACCCUGtt | (SEQ ID NO. 428) |
| Antisense strand siRNA: CAGGGUGCCAUCCUCCAUCtt | (SEQ ID NO. 429) |
| Target sequence 79: AAATCAACAAAATGATTTCTT | (SEQ ID NO. 430) |
| Position in gene sequence: 2378 | |
| GC content: 19% | |
| Sense strand siRNA: AUCAACAAAAUGAUUUCUUtt | (SEQ ID NO. 431) |
| Antisense strand siRNA: AAGAAAUCAUUUUGUUGAUtt | (SEQ ID NO. 432) |
| Target sequence 80: AACAAAATGATTTCTTTCTGG | (SEQ ID NO. 433) |
| Position in gene sequence: 2383 | |
| GC content: 28.6% | |
| Sense strand siRNA: CAAAAUGAUUUCUUUCUGGtt | (SEQ ID NO. 434) |
| Antisense strand siRNA: CCAGAAAGAAAUCAUUUUGtt | (SEQ ID NO. 435) |
| Target sequence 81: AAAATGATTTCTTTCTGGAGG | (SEQ ID NO. 436) |
| Position in gene sequence: 2386 | |
| GC content: 33.3% | |
| Sense strand siRNA: AAUGAUUUCUUUCUGGAGGtt | (SEQ ID NO. 437) |
| Antisense strand siRNA: CCUCCAGAAAGAAAUCAUUtt | (SEQ ID NO. 438) |
| Target sequence 82: AATGATTTCTTTCTGGAGGAA | (SEQ ID NO. 439) |
| Position in gene sequence: 2388 | |
| GC content: 33.3% | |
| Sense strand siRNA: UGAUUUCUUUCUGGAGGAAtt | (SEQ ID NO. 440) |
| Antisense strand siRNA: UUCCUCCAGAAAGAAAUCAtt | (SEQ ID NO. 441) |
| Target sequence 83: AACGCCCATAAACGTATCAGC | (SEQ ID NO. 442) |
| Position in gene sequence: 2407 | |
| GC content: 47.6% | |
| Sense strand siRNA: CGCCCAUAAACGUAUCAGCtt | (SEQ ID NO. 443) |
| Antisense strand siRNA: GCUGAUACGUUUAUGGGCGtt | (SEQ ID NO. 444) |
| Target sequence 84: AAACGTATCAGCTCCCAGATG | (SEQ ID NO. 445) |
| Position in gene sequence: 2416 | |
| GC content: 47.6% | |
| Sense strand siRNA: ACGUAUCAGCUCCCAGAUGtt | (SEQ ID NO. 446) |
| Antisense strand siRNA: CAUCUGGGAGCUGAUACGUtt | (SEQ ID NO. 447) |
| Target sequence 85: AAGGCCTCTATGGGGCCATCC | (SEQ ID NO. 448) |
| Position in gene sequence: 2501 | |
| GC content: 61.9% | |
| Sense strand siRNA: GGCCUCUAUGGGGCCAUCCtt | (SEQ ID NO. 449) |
| Antisense strand siRNA: GGAUGGCCCCAUAGAGGCCtt | (SEQ ID NO. 450) |
| Target sequence 86: AAGTGGTGACTGCCGGCACCA | (SEQ ID NO. 451) |
| Position in gene sequence: 2528 | |
| GC content: 61.9% | |
| Sense strand siRNA: GUGGUGACUGCCGGCACCAtt | (SEQ ID NO. 452) |
| Antisense strand siRNA: UGGUGCCGGCAGUCACCACtt | (SEQ ID NO. 453) |
| Target sequence 87: AATGCCCGGCCTGACCGAGTA | (SEQ ID NO. 454) |
| Position in gene sequence: 2590 | |
| GC content: 61.9% | |
| Sense strand siRNA: UGCCCGGCCUGACCGAGUAtt | (SEQ ID NO. 455) |
| Antisense strand siRNA: UACUCGGUCAGGCCGGGCAtt | (SEQ ID NO. 456) |
| Target sequence 88: AAAGCCATGGTGCAGGCCCCA | (SEQ ID NO. 457) |
| Position in gene sequence: 2623 | |
| GC content: 61.9% | |
| Sense strand siRNA: AGCCAUGGUGCAGGCCCCAtt | (SEQ ID NO. 458) |
| Antisense strand siRNA: UGGGGCCUGCACCAUGGCUtt | (SEQ ID NO. 459) |
| Target sequence 89: AAGAGCTGTGGATTGCAGCTG | (SEQ ID NO. 460) |
| Position in gene sequence: 2681 | |
| GC content: 52.4% | |
| Sense strand siRNA: GAGCUGUGGAUUGCAGCUGtt | (SEQ ID NO. 461) |
| Antisense strand siRNA: CAGCUGCAAUCCACAGCUCtt | (SEQ ID NO. 462) |
| Target sequence 90: AAGAGCAGGGGCACTGATCTA | (SEQ ID NO. 463) |
| Position in gene sequence: 2773 | |
| GC content: 52.4% | |
| Sense strand siRNA: GAGCAGGGGCACUGAUCUAtt | (SEQ ID NO. 464) |
| Antisense strand siRNA: UAGAUCAGUGCCCCUGCUCtt | (SEQ ID NO. 465) |
| Target sequence 91: AAGACAGCCACTACTGTGGGC | (SEQ ID NO. 466) |
| Position in gene sequence: 2800 | |
| GC content: 57.1% | |
| Sense strand siRNA: GACAGCCACUACUGUGGGCtt | (SEQ ID NO. 467) |
| Antisense strand siRNA: GCCCACAGUAGUGGCUGUCtt | (SEQ ID NO. 468) |
| Target sequence 92: AAAATCTTCAACTACGGCCGC | (SEQ ID NO. 469) |
| Position in gene sequence: 2839 | |
| GC content: 47.6% | |
| Sense strand siRNA: AAUCUUCAACUACGGCCGCtt | (SEQ ID NO. 470) |
| Antisense strand siRNA: GCGGCCGUAGUUGAAGAUUtt | (SEQ ID NO. 471) |
| Target sequence 93: AATCTTCAACTACGGCCGCAT | (SEQ ID NO. 472) |
| Position in gene sequence: 2841 | |
| GC content: 47.6% | |
| Sense strand siRNA: UCUUCAACUACGGCCGCAUtt | (SEQ ID NO. 473) |
| Antisense strand siRNA: AUGCGGCCGUAGUUGAAGAtt | (SEQ ID NO. 474) |
| Target sequence 94: AACTACGGCCGCATCTATGGT | (SEQ ID NO. 475) |
| Position in gene sequence: 2848 | |
| GC content: 52.4% | |
| Sense strand siRNA: CUACGGCCGCAUCUAUGGUtt | (SEQ ID NO. 476) |
| Antisense strand siRNA: ACCAUAGAUGCGGCCGUAGtt | (SEQ ID NO. 477) |
| Target sequence 95: AATGCAGTTTAACCACCGGCT | (SEQ ID NO. 478) |
| Position in gene sequence: 2898 | |
| GC content: 47.6% | |
| Sense strand siRNA: UGCAGUUUAACCACCGGCUtt | (SEQ ID NO. 479) |
| Antisense strand siRNA: AGCCGGUGGUUAAACUGCAtt | (SEQ ID NO. 480) |
| Target sequence 96: AACCACCGGCTCACACAGCAG | (SEQ ID NO. 481) |
| Position in gene sequence: 2908 | |
| GC content: 61.9% | |
| Sense strand siRNA: CCACCGGCUCACACAGCAGtt | (SEQ ID NO. 482) |
| Antisense strand siRNA: CUGCUGUGUGAGCCGGUGGtt | (SEQ ID NO. 483) |
| Target sequence 97: AAGGCCCAGCAGATGTACGCT | (SEQ ID NO. 484) |
| Position in gene sequence: 2941 | |
| GC content: 57.1% | |
| Sense strand siRNA: GGCCCAGCAGAUGUACGCUtt | (SEQ ID NO. 485) |
| Antisense strand siRNA: AGCGUACAUCUGCUGGGCCtt | (SEQ ID NO. 486) |
| Target sequence 98: AAGGGCCTCCGCTGGTATCGG | (SEQ ID NO. 487) |
| Position in gene sequence: 2968 | |
| GC content: 66.7% | |
| Sense strand siRNA: GGGCCUCCGCUGGUAUCGGtt | (SEQ ID NO. 488) |
| Antisense strand siRNA: CCGAUACCAGCGGAGGCCCtt | (SEQ ID NO. 489) |
| Target sequence 99: AACCTCCCAGTGGACAGGACT | (SEQ ID NO. 490) |
| Position in gene sequence: 3025 | |
| GC content: 57.1% | |
| Sense strand siRNA: CCUCCCAGUGGACAGGACUtt | (SEQ ID NO. 491) |
| Antisense strand siRNA: AGUCCUGUCCACUGGGAGGtt | (SEQ ID NO. 492) |
| Target sequence 100: AAGGTCCAGAGAGAAACTGCA | (SEQ ID NO. 493) |
| Position in gene sequence: 3079 | |
| GC content: 47.6% | |
| Sense strand siRNA: GGUCCAGAGAGAAACUGCAtt | (SEQ ID NO. 494) |
| Antisense strand siRNA: UGCAGUUUCUCUCUGGACCtt | (SEQ ID NO. 495) |
| Target sequence 101: AAACTGCAAGGAAGTCACAGT | (SEQ ID NO. 496) |
| Position in gene sequence: 3092 | |
| GC content: 42.9% | |
| Sense strand siRNA: ACUGCAAGGAAGUCACAGUtt | (SEQ ID NO. 497) |
| Antisense strand siRNA: ACUGUGACUUCCUUGCAGUtt | (SEQ ID NO. 498) |
| Target sequence 102: AAGGAAGTCACAGTGGAAGAA | (SEQ ID NO. 499) |
| Position in gene sequence: 3099 | |
| GC content: 42.9% | |
| Sense strand siRNA: GGAAGUCACAGUGGAAGAAtt | (SEQ ID NO. 500) |
| Antisense strand siRNA: UUCUUCCACUGUGACUUCCtt | (SEQ ID NO. 501) |
| Target sequence 103: AAGTCACAGTGGAAGAAGTGG | (SEQ ID NO. 502) |
| Position in gene sequence: 3103 | |
| GC content: 47.6% | |
| Sense strand siRNA: GUCACAGUGGAAGAAGUGGtt | (SEQ ID NO. 503) |
| Antisense strand siRNA: CCACUUCUUCCACUGUGACtt | (SEQ ID NO. 504) |
| Target sequence 104: AAGAAGTGGGAGGTGGTTGCT | (SEQ ID NO. 505) |
| Position in gene sequence: 3115 | |
| GC content: 52.4% | |
| Sense strand siRNA: GAAGUGGGAGGUGGUUGCUtt | (SEQ ID NO. 506) |
| Antisense strand siRNA: AGCAACCACCUCCCACUUCtt | (SEQ ID NO. 507) |
| Target sequence 105: AAGTGGGAGGTGGTTGCTGAA | (SEQ ID NO. 508) |
| Position in gene sequence: 3118 | |
| GC content: 52.4% | |
| Sense strand siRNA: GUGGGAGGUGGUUGCUGAAtt | (SEQ ID NO. 509) |
| Antisense strand siRNA: UUCAGCAACCACCUCCCACtt | (SEQ ID NO. 510) |
| Target sequence 106: AACGGGCATGGAAGGGGGGCA | (SEQ ID NO. 511) |
| Position in gene sequence: 3137 | |
| GC content: 66.7% | |
| Sense strand siRNA: CGGGCAUGGAAGGGGGGCAtt | (SEQ ID NO. 512) |
| Antisense strand siRNA: UGCCCCCCUUCCAUGCCCGtt | (SEQ ID NO. 513) |
| Target sequence 107: AAGGGGGGCACAGAGTCAGAA | (SEQ ID NO. 514) |
| Position in gene sequence: 3148 | |
| GC content: 57.1% | |
| Sense strand siRNA: GGGGGGCACAGAGUCAGAAtt | (SEQ ID NO. 515) |
| Antisense strand siRNA: UUCUGACUCUGUGCCCCCCtt | (SEQ ID NO. 516) |
| Target sequence 108: AAATGTTCAATAAGCTTGAGA | (SEQ ID NO. 517) |
| Position in gene sequence: 3167 | |
| GC content: 28.6% | |
| Sense strand siRNA: AUGUUCAAUAAGCUUGAGAtt | (SEQ ID NO. 518) |
| Antisense strand siRNA: UCUCAAGCUUAUUGAACAUtt | (SEQ ID NO. 519) |
| Target sequence 109: AATAAGCTTGAGAGCATTGCT | (SEQ ID NO. 520) |
| Position in gene sequence: 3175 | |
| GC content: 38.1% | |
| Sense strand siRNA: UAAGCUUGAGAGCAUUGCUtt | (SEQ ID NO. 521) |
| Antisense strand siRNA: AGCAAUGCUCUCAAGCUUAtt | (SEQ ID NO. 522) |
| Target sequence 110: AAGCTTGAGAGCATTGCTACG | (SEQ ID NO. 523) |
| Position in gene sequence: 3178 | |
| GC content: 47.6% | |
| Sense strand siRNA: GCUUGAGAGCAUUGCUACGtt | (SEQ ID NO. 524) |
| Antisense strand siRNA: CGUAGCAAUGCUCUCAAGCtt | (SEQ ID NO. 525) |
| Target sequence 111: AAGAGTTTATGACCAGCCGTG | (SEQ ID NO. 526) |
| Position in gene sequence: 3269 | |
| GC content: 47.6% | |
| Sense strand siRNA: GAGUUUAUGACCAGCCGUGtt | (SEQ ID NO. 527) |
| Antisense strand siRNA: CACGGCUGGUCAUAAACUCtt | (SEQ ID NO. 528) |
| Target sequence 112: AATTGGGTGGTACAGAGCTCT | (SEQ ID NO. 529) |
| Position in gene sequence: 3292 | |
| GC content: 47.6% | |
| Sense strand siRNA: UUGGGUGGUACAGAGCUCUtt | (SEQ ID NO. 530) |
| Antisense strand siRNA: AGAGCUCUGUACCACCCAAtt | (SEQ ID NO. 531) |
| Target sequence 113: AAGTGGCTGTTTGAAGAGTTT | (SEQ ID NO. 532) |
| Position in gene sequence: 3349 | |
| GC content: 38.1% | |
| Sense strand siRNA: GUGGCUGUUUGAAGAGUUUtt | (SEQ ID NO. 533) |
| Antisense strand siRNA: AAACUCUUCAAACAGCCACtt | (SEQ ID NO. 534) |
| Target sequence 114: AAGAGTTTGCCATAGATGGGC | (SEQ ID NO. 535) |
| Position in gene sequence: 3362 | |
| GC content: 47.6% | |
| Sense strand siRNA: GAGUUUGCCAUAGAUGGGCtt | (SEQ ID NO. 536) |
| Antisense strand siRNA: GCCCAUCUAUGGCAAACUCtt | (SEQ ID NO. 537) |
| Target sequence 115: AACCTCTTGACCAGGTGCATG | (SEQ ID NO. 538) |
| Position in gene sequence: 3469 | |
| GC content: 52.4% | |
| Sense strand siRNA: CCUCUUGACCAGGUGCAUGtt | (SEQ ID NO. 539) |
| Antisense strand siRNA: CAUGCACCUGGUCAAGAGGtt | (SEQ ID NO. 540) |
| Target sequence 116: AAGCTGGGTCTGAATGACTTG | (SEQ ID NO. 541) |
| Position in gene sequence: 3499 | |
| GC content: 47.6% | |
| Sense strand siRNA: GCUGGGUCUGAAUGACUUGtt | (SEQ ID NO. 542) |
| Antisense strand siRNA: CAAGUCAUUCAGACCCAGCtt | (SEQ ID NO. 543) |
| Target sequence 117: AATGACTTGCCCCAGTCAGTC | (SEQ ID NO. 544) |
| Position in gene sequence: 3511 | |
| GC content: 52.4% | |
| Sense strand siRNA: UGACUUGCCCCAGUCAGUCtt | (SEQ ID NO. 545) |
| Antisense strand siRNA: GACUGACUGGGGCAAGUCAtt | (SEQ ID NO. 546) |
| Target sequence 118: AAGGAAGTGACCATGGATTGT | (SEQ ID NO. 547) |
| Position in gene sequence: 3571 | |
| GC content: 42.9% | |
| Sense strand siRNA: GGAAGUGACCAUGGAUUGUtt | (SEQ ID NO. 548) |
| Antisense strand siRNA: ACAAUCCAUGGUCACUUCCtt | (SEQ ID NO. 549) |
| Target sequence 119: AAGTGACCATGGATTGTAAAA | (SEQ ID NO. 550) |
| Position in gene sequence: 3575 | |
| GC content: 33.3% | |
| Sense strand siRNA: GUGACCAUGGAUUGUAAAAtt | (SEQ ID NO. 551) |
| Antisense strand siRNA: UUUUACAAUCCAUGGUCACtt | (SEQ ID NO. 552) |
| Target sequence 120: AAAACCCCTTCCAACCCAACT | (SEQ ID NO. 553) |
| Position in gene sequence: 3592 | |
| GC content: 47.6% | |
| Sense strand siRNA: AACCCCUUCCAACCCAACUtt | (SEQ ID NO. 554) |
| Antisense strand siRNA: AGUUGGGUUGGAAGGGGUUtt | (SEQ ID NO. 555) |
| Target sequence 121: AACCCCTTCCAACCCAACTGG | (SEQ ID NO. 556) |
| Position in gene sequence: 3594 | |
| GC content: 57.1% | |
| Sense strand siRNA: CCCCUUCCAACCCAACUGGtt | (SEQ ID NO. 557) |
| Antisense strand siRNA: CCAGUUGGGUUGGAAGGGGtt | (SEQ ID NO. 558) |
| Target sequence 122: AACCCAACTGGGATGGAAAGG | (SEQ ID NO. 559) |
| Position in gene sequence: 3604 | |
| GC content: 52.4% | |
| Sense strand siRNA: CCCAACUGGGAUGGAAAGGtt | (SEQ ID NO. 560) |
| Antisense strand siRNA: CCUUUCCAUCCCAGUUGGGtt | (SEQ ID NO. 561) |
| Target sequence 123: AACTGGGATGGAAAGGAGATA | (SEQ ID NO. 562) |
| Position in gene sequence: 3609 | |
| GC content: 42.9% | |
| Sense strand siRNA: CUGGGAUGGAAAGGAGAUAtt | (SEQ ID NO. 563) |
| Antisense strand siRNA: UAUCUCCUUUCCAUCCCAGtt | (SEQ ID NO. 564) |
| Target sequence 124: AAAGGAGATACGGGATTCCCC | (SEQ ID NO. 565) |
| Position in gene sequence: 3620 | |
| GC content: 52.4% | |
| Sense strand siRNA: AGGAGAUACGGGAUUCCCCtt | (SEQ ID NO. 566) |
| Antisense strand siRNA: GGGGAAUCCCGUAUCUCCUtt | (SEQ ID NO. 567) |
| Target sequence 125: AAGCGCTGGATATTTACCAGA | (SEQ ID NO. 568) |
| Position in gene sequence: 3647 | |
| GC content: 42.9% | |
| Sense strand siRNA: GCGCUGGAUAUUUACCAGAtt | (SEQ ID NO. 569) |
| Antisense strand siRNA: UCUGGUAAAUAUCCAGCGCtt | (SEQ ID NO. 570) |
| Target sequence 126: AATTGAACTCACCAAAGGCTC | (SEQ ID NO. 571) |
| Position in gene sequence: 3669 | |
| GC content: 42.9% | |
| Sense strand siRNA: UUGAACUCACCAAAGGCUCtt | (SEQ ID NO. 572) |
| Antisense strand siRNA: GAGCCUUUGGUGAGUUCAAtt | (SEQ ID NO. 573) |
| Target sequence 127: AACTCACCAAAGGCTCCTTGG | (SEQ ID NO. 574) |
| Position in gene sequence: 3674 | |
| GC content: 52.4% | |
| Sense strand siRNA: CUCACCAAAGGCUCCUUGGtt | (SEQ ID NO. 575) |
| Antisense strand siRNA: CCAAGGAGCCUUUGGUGAGtt | (SEQ ID NO. 576) |
| Target sequence 128: AAAGGCTCCTTGGAAAAACGA | (SEQ ID NO. 577) |
| Position in gene sequence: 3682 | |
| GC content: 42.9% | |
| Sense strand siRNA: AGGCUCCUUGGAAAAACGAtt | (SEQ ID NO. 578) |
| Antisense strand siRNA: UCGUUUUUCCAAGGAGCCUtt | (SEQ ID NO. 579) |
| Target sequence 129: AAAAACGAAGCCAGCCTGGAC | (SEQ ID NO. 580) |
| Position in gene sequence: 3695 | |
| GC content: 52.4% | |
| Sense strand siRNA: AAACGAAGCCAGCCUGGACtt | (SEQ ID NO. 581) |
| Antisense strand siRNA: GUCCAGGCUGGCUUCGUUUtt | (SEQ ID NO. 571) |
| Target sequence 130: AAACGAAGCCAGCCTGGACCA | (SEQ ID NO. 572) |
| Position in gene sequence: 3697 | |
| GC content: 57.1% | |
| Sense strand siRNA: ACGAAGCCAGCCUGGACCAtt | (SEQ ID NO. 573) |
| Antisense strand siRNA: UGGUCCAGGCUGGCUUCGUtt | (SEQ ID NO. 574) |

1.-113. (canceled)

114. A composition comprising:
a recombinant polypeptide comprising an organelle localization signal operably linked to a protein transduction domain, wherein the recombinant polypeptide is operably linked to a polynucleotide.

115. The composition of claim 114, wherein the composition is a viral vector.

116. A composition according to claim 114, wherein the composition is a recombinant bacteriophage.

117. A composition according to claim 114, wherein the organelle localization signal operably linked to the protein transduction domain is expressed on an exterior surface of a vector.

118. A composition according to claim 114, wherein the compositions is a virus particle.

119. A composition according to claim 114, wherein the polynucleotide encodes a mitochondrial protein, a chloroplast protein, heterologous polypeptide, siRNA or antisense nucleic acid specific for mitochondrial or chloroplast mRNA.

120. A method for treating a mitochondrial disease comprising contacting at least one cell of a host having or suspected of having a mitochondrial disease with a vector comprising at least one protein transduction domain on a surface of the vector, at least one mitochondrial targeting signal on a surface of the vector, and a polynucleotide encoding a functional mitochondrial polypeptide, wherein the functional mitochondrial polypeptide is expressed in at least one mitochondrion of the cell.

121. A cell comprising a composition according to claim 114.

122. A method for producing a mtDNA depleted cell comprising: contacting the cell with at least one siRNA directed to POLγ.

123. The method of claim 122, wherein the siRNA is selected from the siRNAs listed in TABLE 3 or a sequence having 80-100% homology to the siRNAs listed in TABLE 3 or SEQ ID NOs. 195574.

124. The method of claim 123, wherein a target sequence of POLγ RNA inhibition is selected from the POLγ target sequences in TABLE 3.

125. A kit for transfecting organelles, the kit comprising: a polynucleotide encoding an organelle localization signal operably linked to a bacteriophage lambda surface polypeptide; and bacteriophage lambda packaging components for preparing a recombinant lambda vector.

126. A method for transfecting an organelle, the method comprising the step of introducing a recombinant viral vector comprising a nucleic acid to be expressed in the organelle into the cytosol of a cell, wherein the recombinant viral vector displays an organelle localization signal on a surface of the vector for directing the vector to an organelle to be transfected.

127. A method for producing a cell lacking mitochondrial DNA comprising: contacting the cell with at least one siRNA directed to a gene involved in sustaining or maintaining mtDNA or mtDNA stability.

The application's sequence listing, which the Patent Office published only in electronic form, follows.

SEQUENCE LISTING (585 sequences)

SEQ ID NO: 1 - protein, 16 aa, Drosophila melanogaster
RQIKITFQNRRMKWKK

SEQ ID NO: 2 - protein, 86 aa, HIV
MEPVDPRLEPWKHPGSQPKTACTNCYCKKCCFHCQVCFITKALGISYGRKKRRQRRRAHQNSQTHQASLSKQPTSQPRGDPTGPKE

SEQ ID NO: 3 - protein, 11 aa, HIV
YGRKKRRQRRR

SEQ ID NO: 4 - protein, 9 aa, HIV
RKKRRQRRR

SEQ ID NO: 5 - protein, 110 aa, Bacteriophage lambda
MTSKETFTHYQPQGNSDPAHTATAPGGLSAKAPAMTPLMLDTSSRKLVAWDGTTDGAAVGELAVAADQTSTTLTFYKSGTFRYEDVLWPEAASDETKKRTAFAGTAISIV

SEQ ID NO: 6 - DNA, 16571 bp, Homo sapiens
gatcacaggtctatcaccctattaaccactcacgggagctctccatgcatttggtattttcgtctggggggtgtgcacgcgatagcattgcgagacgctggagccggagcaccctatgtcgcagtatctgtctttgattcctgcctcattctattatttatcgcacctacgttcaatattacaggcgaacatacctactaaagtgtgttaattaattaatgcttgtaggacataataataacaattgaatgtctgcacagccgctttccacacagacatcataacaaaaaatttccaccaaacccccccctccccccgcttctggccacagcacttaaacacatctctgccaaaccccaaaaacaaagaaccctaacaccagcctaaccagatttcaaattttatctttaggcggtatgcacttttaacagtcaccccccaactaacacattattttcccctcccactcccatactactaatctcatcaatacaacccccgcccatcctacccagcacacacacaccgctgctaaccccataccccgaaccaaccaaaccccaaagacaccccccacagtttatgtagcttacctcctcaaagcaatacactgaaaatgtttagacgggctcacatcaccccataaacaaataggtttggtcctagcctttctattagctcttagtaagattacacatgcaagcatccccgttccagtgagttcaccctctaaatcaccacgatcaaaagggacaagcatcaagcacgcagcaatgcagctcaaaacgcttagcctagccacacccccacgggaaacagcagtgattaacctttagcaataaacgaaagtttaactaagctatactaaccccagggttggtcaatttcgtgccagccaccgcggtcacacgattaacccaagtcaatagaagccggcgtaaagagtgttttagatcaccccctccccaataaagctaaaactcacctgagttgtaaaaaactccagttgacacaaaatagactacgaaagtggctttaacatatctgaacacacaatagctaagacccaaactgggattagataccccactatgcttagccctaaacctcaacagttaaatcaacaaaactgctcgccagaacactacgagccacagcttaaaactcaaaggacctggcggtgcttcatatccctctagaggagcctgttctgtaatcgataaaccccgatcaacctcaccacctcttgctcagcctatataccgccatcttcagcaaaccctgatgaaggctacaaagtaagcgcaagtacccacgtaaagacgttaggtcaaggtgtagcccatgaggtggcaagaaatgggctacattttctaccccagaaaactacgatagcccttatgaaacttaagggtcgaaggtggatttagcagtaaactgagagtagagtgcttagttgaacagggccctgaagcgcgtacacaccgcccgtcaccctcctcaagtatacttcaaaggacatttaactaaaacccctacgcatttatatagaggagacaagtcgtaacatggtaagtgtactggaaagtgcacttggacgaaccagagtgtagcttaacacaaagcacccaacttacacttaggagatttcaacttaacttgaccgctctgagctaaacctagccccaaacccactccaccttactaccagacaaccttagccaaaccatttacccaaataaagtataggcgatagaaattgaaacctggcgcaatagatatagtaccgcaagggaaagatgaaaaattataaccaagcataatatagcaaggactaacccctataccttctgcataatgaattaactagaaataactttgcaaggagagccaaagctaagacccccgaaaccagacgagctacctaagaacagctaaaagagcacacccgtctatgtagcaaaatagtgggaagatttataggtagaggcgacaaacctaccgagcctggtgatagctggttgtccaagatagaatcttagttcaactttaaatttgcccacagaaccctctaaatccccttgtaaatttaactgttagtccaaagaggaacagctctttggacactaggaaaaaaccttgtagagagagtaaaaaatttaacacccatagtaggcctaaaagcagccaccaattaagaaagcgttcaagctcaacacccactacctaaaaaatcccaaacatataactgaactcctcacacccaattggaccaatctatcaccctatagaagaactaatgttagtataagtaacatgaaaacattctcctccgcataagcctgcgtcagatcaaaacactgaactgacaattaacagcccaatatctacaatcaaccaacaagtcattattaccctcactgtcaacccaacacaggcatgctcataaggaaaggttaaaaaaagtaaaaggaactcggcaaaccttaccccgcctgtttaccaaaaacatcacctctagcatcaccagtattagaggcaccgcctgcccagtgacacatgtttaacggccgcggtaccctaaccgtgcaaaggtagcataatcacttgttccttaaatagggacctgtatgaatggctccacgagggttcagctgtctcttacttttaaccagtgaaattgacctgcccgtgaagaggcgggcatgacacagcaagacgagaagaccctatggagctttaatttattaatgcaaacagtacctaacaaacccacaggtcctaaactaccaaacctgcattaaaaatttcggttggggcgacctcggagcagaacccaacctccgagcagtacatgctaagacttcaccagtcaaagcgaactactatactcaattgatccaataacttgaccaacggaacaagttaccctagggataacagcgcaatcctattctagagtccatatcaacaatagggtttacgacctcgatgttggatcaggacatcccgatggtgcagccgctattaaaggttcgtttgttcaacgattaaagtcctacgtgatctgagttcagaccggagtaatccaggtcggtttctatctacttcaaattcctccctgtacgaaaggacaagagaaataaggcctacttcacaaagcgccttcccccgtaaatgatatcatctcaacttagtattatacccacacccacccaagaacagggtttgttaagatggcagagcccggtaatcgcataaaacttaaaactttacagtcagaggttcaattcctcttcttaacaacatacccatggccaacctcctactcctcattgtacccattctaatcgcaatggcattcctaatgcttaccgaacgaaaaattctaggctatatacaactacgcaaaggccccaacgttgtaggcccctacgggctactacaacccttcgctgacgccataaaactcttcaccaaagagcccctaaaacccgccacatctaccatcaccctctacatcaccgccccgaccttagctctcaccatcgctcttctactatgaacccccctccccatacccaaccccctggtcaacctcaacctaggcctcctatttattctagccacctctagcctagccgtttactcaatcctctgatcagggtgagcatcaaactcaaactacgccctgatcggcgcactgcgagcagtagcccaaacaatctcatatgaagtcaccctagccatcattctactatcaacattactaataagtggctcctttaacctctccacccttatcacaacacaagaacacctctgattactcctgccatcatgacccttggccataatatgatttatctccacactagcagagaccaaccgaacccccttcgaccttgccgaaggggagtccgaactagtctcaggcttcaacatcgaatacgccgcaggccccttcgccctattcttcatagccgaatacacaaacattattataataaacaccctcaccactacaatcttcctaggaacaacatatgacgcactctcccctgaactctacacaacatattttgtcaccaagaccctacttctaacctccctgttcttatgaattcgaacagcatacccccgattccgctacgaccaactcatacacctcctatgaaaaaacttcctaccactcaccctagcattacttatatgatatgtctccatacccattacaatctccagcattccccctcaaacctaagaaatatgtctgataaaagagttactttgatagagtaaataataggagcttaaacccccttatttctaggactatgagaatcgaacccatccctgagaatccaaaattctccgtgccacctatcacaccccatcctaaagtaaggtcagctaaataagctatcgggcccataccccgaaaatgttggttatacccttcccgtactaattaatcccctggcccaacccgtcatctactctaccatctttgcaggcacactcatcacagcgctaagctcgcactgattttttacctgagtaggcctagaaataaacatgctagcttttattccagttctaaccaaaaaaataaaccctcgttccacagaagctgccatcaagtatttcctcacgcaagcaaccgcatccataatccttctaatagctatcctcttcaacaatatactctccggacaatgaaccataaccaatactaccaatcaatactcatcattaataatcataatggctatagcaataaaactaggaatagccccctttcacttctgagtcccagaggttacccaaggcacccctctgacatccggcctgcttcttctcacatgacaaaaactagcccccatctcaatcatataccaaatctctccctcactaaacgtaagccttctcctcactctctcaatcttatccatcatagcaggcagttgaggtggattaaaccaaacccagctacgcaaaatcttagcatactcctcaattacccacataggatgaataatagcagttctaccgtacaaccctaacataaccattcttaatttaactatttatattatcctaactactaccgcattcctactactcaacttaaactccagcaccacgaccctactactatctcgcacctgaaacaagctaacatgactaacacccttaattccatccaccctcctctccctaggaggcctgcccccgctaaccggctttttgcccaaatgggccattatcgaagaattcacaaaaaacaatagcctcatcatccccaccatcatagccaccatcaccctccttaacctctacttctacctacgcctaatctactccacctcaatcacactactccccatatctaacaacgtaaaaataaaatgacagtttgaacatacaaaacccaccccattcctccccacactcatcgcccttaccacgctactcctacctatctccccttttatactaataatcttatagaaatttaggttaaatacagaccaagagccttcaaagccctcagtaagttgcaatacttaatttctgcaacagctaaggactgcaaaaccccactctgcatcaactgaacgcaaatcagccactttaattaagctaagcccttactagaccaatgggacttaaacccacaaacacttagttaacagctaagcaccctaatcaactggcttcaatctacttctcccgccgccgggaaaaaaggcgggagaagccccggcaggtttgaagctgcttcttcgaatttgcaattcaatatgaaaatcacctcggagctggtaaaaagaggcctaacccctgtctttagatttacagtccaatgcttcactcagccattttacctcacccccactgatgttcgccgaccgttgactattctctacaaaccacaaagacattggaacactatacctattattcggcgcatgagctggagtcctaggcacagctctaagcctccttattcgagccgagctgggccagccaggcaaccttctaggtaacgaccacatctacaacgttatcgtcacagcccatgcatttgtaataatcttcttcatagtaatacccatcataatcggaggctttggcaactgactagttcccctaataatcggtgcccccgatatggcgtttccccgcataaacaacataagcttctgactcttacctccctctctcctactcctgctcgcatctgctatagtggaggccggagcaggaacaggttgaacagtctaccctcccttagcagggaactactcccaccctggagcctccgtagacctaaccatcttctccttacacctagcaggtgtctcctctatcttaggggccatcaatttcatcacaacaattatcaatataaaaccccctgccataacccaataccaaacgcccctcttcgtctgatccgtcctaatcacagcagtcctacttctcctatctctcccagtcctagctgctggcatcactatactactaacagaccgcaacctcaacaccaccttcttcgaccccgccggaggaggagaccccattctataccaacacctattctgatttttcggtcaccctgaagtttatattcttatcctaccaggcttcggaataatctcccatattgtaacttactactccggaaaaaaagaaccatttggatacataggtatggtctgagctatgatatcaattggcttcctagggtttatcgtgtgagcacaccatatatttacagtaggaatagacgtagacacacgagcatatttcacctccgctaccataatcatcgctatccccaccggcgtcaaagtatttagctgactcgccacactccacggaagcaatatgaaatgatctgctgcagtgctctgagccctaggattcatctttcttttcaccgtaggtggcctgactggcattgtattagcaaactcatcactagacatcgtactacacgacacgtactacgttgtagctcacttccactatgtcctatcaataggagctgtatttgccatcataggaggcttcattcactgatttcccctattctcaggctacaccctagaccaaacctacgccaaaatccatttcactatcatattcatcggcgtaaatctaactttcttcccacaacactttctcggcctatccggaatgccccgacgttactcggactaccccgatgcatacaccacatgaaacatcctatcatctgtaggctcattcatttctctaacagcagtaatattaataattttcatgatttgagaagccttcgcttcgaagcgaaaagtcctaatagtagaagaaccctccataaacctggagtgactatatggatgccccccaccctaccacacattcgaagaacccgtatacataaaatctagacaaaaaaggaaggaatcgaaccccccaaagctggtttcaagccaaccccatggcctccatgactttttcaaaaaggtattagaaaaaccatttcataactttgtcaaagttaaattataggctaaatcctatatatcttaatggcacatgcagcgcaagtaggtctacaagacgctacttcccctatcatagaagagcttatcacctttcatgatcacgccctcataatcattttccttatctgcttcctagtcctgtatgcccttttcctaacactcacaacaaaactaactaatactaacatctcagacgctcaggaaatagaaaccgtctgaactatcctgcccgccatcatcctagtcctcatcgccctcccatccctacgcatcctttacataacagacgaggtcaacgatccctcccttaccatcaaatcaattggccaccaatggtactgaacctacgagtacaccgactacggcggactaatcttcaactcctacatacttcccccattattcctagaaccaggcgacctgcgactccttgacgttgacaatcgagtagtactcccgattgaagcccccattcgtataataattacatcacaagacgtcttgcactcatgagctgtccccacattaggcttaaaaacagatgcaattcccggacgtctaaaccaaaccactttcaccgctacacgaccgggggtatactacggtcaatgctctgaaatctgtggagcaaaccacagtttcatgcccatcgtcctagaattaattcccctaaaaatctttgaaatagggcccgtatttaccctatagcaccccctctaccccctctagagcccactgtaaagctaacttagcattaaccttttaagttaaagattaagagaaccaacacctctttacagtgaaatgccccaactaaatactaccgtatggcccaccataattacccccatactccttacactattcctcatcacccaactaaaaatattaaacacaaactaccacctacctccctcaccaaagcccataaaaataaaaaattataacaaaccctgagaaccaaaatgaacgaaaatctgttcgcttcattcattgcccccacaatcctaggcctacccgccgcagtactgatcattctatttccccctctattgatccccacctccaaatatctcatcaacaaccgactaatcaccacccaacaatgactaatcaaactaacctcaaaacaaatgatagccatacacaacactaaaggacgaacctgatctcttatactagtatccttaatcatttttattgccacaactaacctcctcggactcctgcctcactcatttacaccaaccacccaactatctataaacctagccatggccatccccttatgagcgggcgcagtgattataggctttcgctctaagattaaaaatgccctagcccacttcttaccacaaggcacacctacaccccttatccccatactagttattatcgaaaccatcagcctactcattcaaccaatagccctggccgtacgcctaaccgctaacattactgcaggccacctactcatgcacctaattggaagcgccaccctagcaatatcaaccattaaccttccctctacacttatcatcttcacaattctaattctactgactatcctagaaatcgctgtcgccttaatccaagcctacgttttcacacttctagtaagcctctacctgcacgacaacacataatgacccaccaatcacatgcctatcatatagtaaaacccagcccatgacccctaacaggggccctctcagccctcctaatgacctccggcctagccatgtgatttcacttccactccataacgctcctcatactaggcctactaaccaacacactaaccatataccaatggtggcgcgatgtaacacgagaaagcacataccaaggccaccacacaccacctgtccaaaaaggccttcgatacgggataatcctatttattacctcagaagtttttttcttcgcaggatttttctgagccttttaccactccagcctagcccctaccccccaactaggagggcactggcccccaacaggcatcaccccgctaaatcccctagaagtcccactcctaaacacatccgtattactcgcatcaggagtatcaatcacctgagctcaccatagtctaatagaaaacaaccgaaaccaaataattcaagcactgcttattacaattttactgggtctctattttaccctcctacaagcctcagagtacttcgagtctcccttcaccatttccgacggcatctacggctcaacattttttgtagccacaggcttccacggacttcacgtcattattggctcaactttcctcactatctgcttcatccgccaactaatatttcactttacatccaaacatcactttggcttcgaagccgccgcctgatactggcattttgtagatgtggtttgactatttctgtatgtctccatctattgatgagggtcttactcttttagtataaatagtaccgttaacttccaattaactagttttgacaacattcaaaaaagagtaataaacttcgccttaattttaataatcaacaccctcctagccttactactaataattattacattttgactaccacaactcaacggctacatagaaaaatccaccccttacgagtgcggcttcgaccctatatcccccgcccgcgtccctttctccataaaattcttcttagtagctattaccttcttattatttgatctagaaattgccctccttttacccctaccatgagccctacaaacaactaacctgccactaatagttatgtcatccctcttattaatcatcatcctagccctaagtctggcctatgagtgactacaaaaaggattagactgagccgaattggtatatagtttaaacaaaacgaatgatttcgactcattaaattatgataatcatatttaccaaatgcccctcatttacataaatattatactagcatttaccatctcacttctaggaatactagtatatcgctcacacctcatatcctccctactatgcctagaaggaataatactatcgctgttcattatagctactctcataaccctcaacacccactccctcttagccaatattgtgcctattgccatactagtctttgccgcctgcgaagcagcggtgggcctagccctactagtctcaatctccaacacatatggcctagactacgtacataacctaaacctactccaatgctaaaactaatcgtcccaacaattatattactaccactgacatgactttccaaaaagcacataatttgaatcaacacaaccacccacagcctaattattagcatcatccccctactattttttaaccaaatcaacaacaacctatttagctgttccccaaccttttcctccgaccccctaacaacccccctcctaatactaactacctgactcctacccctcacaatcatggcaagccaacgccacttatccagcgaaccactatcacgaaaaaaactctacctctctatactaatctccctacaaatctccttaattataacattcacagccacagaactaatcatattttatatcttcttcgaaaccacacttatccccaccttggctatcatcacccgatgaggcaaccagccagaacgcctgaacgcaggcacatacttcctattctacaccctagtaggctcccttcccctactcatcgcactaatttacactcacaacaccctaggctcactaaacattctactactcactctcactgcccaagaactatcaaactcctgagccaacaacttaatatgactagcttacacaatagcttttatagtaaagatacctctttacggactccacttatgactccctaaagcccatgtcgaagcccccatcgctgggtcaatagtacttgccgcagtactcttaaaactaggcggctatggtataatacgcctcacactcattctcaaccccctgacaaaacacatagcctaccccttccttgtactatccctatgaggcataattataacaagctccatctgcctacgacaaacagacctaaaatcgctcattgcatactcttcaatcagccacatagccctcgtagtaacagccattctcatccaaaccccctgaagcttcaccggcgcagtcattctcataatcgcccacggactcacatcctcattactattctgcctagcaaactcaaactacgaacgcactcacagtcgcatcataatcctctctcaaggacttcaaactctactcccactaatagctttttgatgacttctagcaagcctcgctaacctcgccttaccccccactattaacctactgggagaactctctgtgctagtaaccacgttctcctgatcaaatatcactctcctacttacaggactcaacatactagtcacagccctatactccctctacatatttaccacaacacaatggggctcactcacccaccacattaacaacataaaaccctcattcacacgagaaaacaccctcatgttcatacacctatcccccattctcctcctatccctcaaccccgacatcattaccgggttttcctcttgtaaatatagtttaaccaaaacatcagattgtgaatctgacaacagaggcttacgaccccttatttaccgagaaagctcacaagaactgctaactcatgcccccatgtctaacaacatggctttctcaacttttaaaggataacagctatccattggtcttaggccccaaaaattttggtgcaactccaaataaaagtaataaccatgcacactactataaccaccctaaccctgacttccctaattccccccatccttaccaccctcgttaaccctaacaaaaaaaactcatacccccattatgtaaaatccattgtcgcatccacctttattatcagtctcttccccacaacaatattcatgtgcctagaccaagaagttattatctcgaactgacactgagccacaacccaaacaacccagctctccctaagcttcaaactagactacttctccataatattcatccctgtagcattgttcgttacatggtccatcatagaattctcactgtgatatataaactcagacccaaacattaatcagttcttcaaatatctactcattttcctaattaccatactaatcttagttaccgctaacaacctattccaactgttcatcggctgagagggcgtaggaattatatccttcttgctcatcagttgatgatacgcccgagcagatgccaacacagcagccattcaagcagtcctatacaaccgtatcggcgatatcggtttcatcctcgccttagcatgatttatcctacactccaactcatgagacccacaacaaatagcccttctaaacgctaatccaagcctcaccccactactaggcctcctcctagcagcagcaggcaaatcagcccaattaggtctccacccctgactcccctcagccatagaaggccccaccccagtctcagccctactccactcaagcactatagttgtagcaggaatcttcttactcatccgcttccaccccctagcagaaaatagcccactaatccaaactctaacactatgcttaggcgctatcaccactctgttcgcagcagtctgcgcccttacacaaaatgacatcaaaaaaatcgtagccttctccacttcaagtcaactaggactcataatagttacaatcggcatcaaccaaccacacctagcattcctgcacatctgtacccacgccttcttcaaagccatactatttatgtgctccgggtccatcatccacaaccttaacaatgaacaagatattcgaaaaataggaggactactcaaaaccatacctctcacttcaacctccctcaccattggcagcctagcattagcaggaatacctttcctcacaggtttctactccaaagaccacatcatcgaaaccgcaaacatatcatacacaaacgcctgagccctatctattactctcatcgctacctccctgacaagcgcctatagcactcgaataattcttctcaccctaacaggtcaacctcgcttccccacccttactaacattaacgaaaataaccccaccctactaaaccccattaaacgcctggcagccggaagcctattcgcaggatttctcattactaacaacatttcccccgcatcccccttccaaacaacaatccccctctacctaaaactcacagccctcgctgtcactttcctaggacttctaacagccctagacctcaactacctaaccaacaaacttaaaataaaatccccactatgcacattttatttctccaacatactcggattctaccctagcatcacacaccgcacaatcccctatctaggccttcttacgagccaaaacctgcccctactcctcctagacctaacctgactagaaaagctattacctaaaacaatttcacagcaccaaatctccacctccatcatcacctcaacccaaaaaggcataattaaactttacttcctctctttcttcttcccactcatcctaaccctactcctaatcacataacctattcccccgagcaatctcaattacaatatatacaccaacaaacaatgttcaaccagtaaccactactaatcaacgcccataatcatacaaagcccccgcaccaataggatcctcccgaatcaaccctgacccctctccttcataaattattcagcttcctacactattaaagtttaccacaaccaccaccccatcatactctttcacccacagcaccaatcctacctccatcgctaaccccactaaaacactcaccaagacctcaacccctgacccccatgcctcaggatactcctcaatagccatcgctgtagtatatccaaagacaaccatcattccccctaaataaattaaaaaaactattaaacccatataacctcccccaaaattcagaataataacacacccgaccacaccgctaacaatcagtactaaacccccataaataggagaaggcttagaagaaaaccccacaaaccccattactaaacccacactcaacagaaacaaagcatacatcattattctcgcacggactacaaccacgaccaatgatatgaaaaaccatcgttgtatttcaactacaagaacaccaatgaccccaatacgcaaaattaaccccctaataaaattaattaaccactcattcatcgacctccccaccccatccaacatctccgcatgatgaaacttcggctcactccttggcgcctgcctgatcctccaaatcaccacaggactattcctagccatacactactcaccagacgcctcaaccgccttttcatcaatcgcccacatcactcgagacgtaaattatggctgaatcatccgctaccttcacgccaatggcgcctcaatattctttatctgcctcttcctacacatcgggcgaggcctatattacggatcatttctctactcagaaacctgaaacatcggcattatcctcctgcttgcaactatagcaacagccttcataggctatgtcctcccgtgaggccaaatatcattctgaggggccacagtaattacaaacttactatccgccatcccatacattgggacagacctagttcaatgaatctgaggaggctactcagtagacagtcccaccctcacacgattctttacctttcacttcatcttacccttcattattgcagccctagcagcactccacctcctattcttgcacgaaacgggatcaaacaaccccctaggaatcacctcccattccgataaaatcaccttccacccttactacacaatcaaagacgccctcggcttacttctcttccttctctccttaatgacattaacactattctcaccagacctcctaggcgacccagacaattataccctagccaaccccttaaacacccctccccacatcaagcccgaatgatatttcctattcgcctacacaattctccgatccgtccctaacaaactaggaggcgtccttgccctattactatccatcctcatcctagcaataatccccatcctccatatatccaaacaacaaagcataatatttcgcccactaagccaatcactttattgactcctagccgcagacctcctcattctaacctgaatcggaggacaaccagtaagctacccttttaccatcattggacaagtagcatccgtactatacttcacaacaatcctaatcctaataccaactatctccctaattgaaaacaaaatactcaaatgggcctgtccttgtagtataaactaatacaccagtcttgtaaaccggagacgaaaacctttttccaaggacaaatcagagaaaaagtctttaactccaccattagcacccaaagctaagattctaatttaaactattctctgttctttcatggggaagcagatttgggtaccacccaagtattgactcacccatcaacaaccgctatgtatttcgtacattactgccagccaccatgaatattgtacggtaccataaatacttgaccacctgtagtacataaaaacccaacccacatcaaaccccccccccccatgcttacaagcaagtacagcaatcaaccttcaactatcacacatcaactgcaactccaaagccacccctcacccactaggataccaacaaacctacccacccttaacagtacatagtacataaagtcatttaccgtacatagcacattacagtcaaatcccttctcgtccccatggatgacccccctcagataggggtcccttgaccaccatcctccgtgaaatcaatatcccgcacaagagtgctactctcctcgctccgggcccataacacttgggggtagctaaagtgaactgtatccgacatctggttcctacttcagggccataaagcctaaatagcccacacgttccccttaaataagacatcacgatg

SEQ ID NO: 7 - protein, 333 aa, Mus musculus
MFRAAAPGQLRRAASLLRFQSTLVIAEHANDSLAPITLNTITAAGRLGGEVSCLVAGTKCDKVVQDLCKVAGVAKVLVAQHDAYKGLLPEELTPLILETQKQFSYTHICAGASAFGKNLLPRVAAKLNVAPVSDIIEIKSPDTFVRTIYAGNALCTVKCDEKVKVFSVRGTSFEAAATSGGSASSEKAPSSSSVGISEWLDQKLTKSDPPELTGAKVVVSGGRGLKSGENFKLLYDLADQLHAAVGASRAAVDAGFVPNDMQVGQTGKIVAPELYIAVGISGAIQHLAGMKDSKTIVAINKDPEAPIFQVADYGIVADLFKVVPEMTEILKKK

SEQ ID NO: 8 - protein, 252 aa, Mus musculus
MRALVAVKRVIDFAVKIRVKPDKSGVVTDGVKHSMNPFCEIAVEEAVRLKEKKLVKEIIAVSCGPSQCQETIRTALAMGADRGIHVEIPGAQAESLGPLQVARVLAKLAEKEKVDLLFLGKQAIDDDCNQTGQMTAGLLDWPQGTFASQVTLEGDKVKVEREIDGGLETLRLKLPAVVTADLRLNEPRYATLPNIMKAKKKKIEVVKAGDLGVDLTSKVSVISVEEPPQRSAGVKVETTEDLVAKLKEVGRI

SEQ ID NO: 9 - protein, 509 aa, Homo sapiens
MQSWSRVYCSLAKRGHFNRISHGLQGLSAVPLRTYADQPIDADVTVIGSGPGGYVAAIKAAQLGFKTVCIEKNETLGGTCLNVGCIPSKALLNNSHYYHMAHGTDFASRGIEMSEVRLNLDKMMEQKSTAVKALTGGIAHLFKQNKVVHVNGYGKITGKNQVTATKADGGTQVIDTKNILIATGSEVTPFPGITIDEDTIVSSTGALSLKKVPEKMVVIGAGVIGVELGSVWQRLGADVTAVEFLGHVGGVGIDMEISKNFQRILQKQGFKFKLNTKVTGATKKSDGKIDVSIEAASGGKAEVITCDVLLVCIGRRPFTKNLGLEELGIELDPRGRIPVNTRFQTKIPNIYAIGDVVAGPMLAHKAEDEGIICVEGMAGGAVHIDYNCVPSVIYTHPEVAWVGKSEEQLKEEGIEYKVGKFPFAANSRAKTNADTDGMVKILGQKSTDRVLGAHILGPGAGEMVNEAALALEYGASCEDIARVCHAHPTLSEAFREANLAASFGKSINF

SEQ ID NO: 10 - protein, 227 aa, Mus musculus
MGASGRLLRAVIMGAPGSGKGTVSSRITKHFELKHLSSGDLLRQNMLQGTEIGVLAKTFIDQGKLIPDDVMTRLALHELKTLTQCSWLLDGFPRTLPQAEALDKVYQIDTVINLNVPFEVIKQRLTARWIHPASGRVYNIEFNPPKTVGIDDLTGEPLIQREDDKPETVIKRLKAYEAQTEPVLQYYQKKGVLETFSGTETNKIWPHVYSFLQTKVPETTQKASVTP

SEQ ID NO: 11 - protein, 464 aa, Mus musculus
MALLTAATRLLGAKNSSCLVLAARHASASSTNLKDVLSNLIPKEQARIKTFKQQHGKTVVGQITVDMMYGGMRGMKGLVYETSVLDPDEGIRFRGYSIPECQKMLPKAKGGEEPLPEGLFWLLVTGQMPTEEQVSWLSREWAKRAALPSHVVTMLDNFPTNLHPMSQLSAAITALNSESNFARAYAEGMNRAKYWELIYEDCMDLIAKLPCVAAKIYRNLYREGSSIGAIDSRLDWSHNFTNMLGYTDPQFTELMRLYLTIHSDHEGGNVSAHTSHLVGSALSDPYLSFAAAMNGLAGPLHGLANQEVLVWLTQLQKEVGKDVSDEKLRDYIWNTLNSGRVVPGYGHAVLRKTDPRYSCQREFALKHLPKDPMFKLVAQLYKIVPNILLEQGKAKNPWPNVDAHSGVLLQYYGMTEMNYYTVLFGVSRALGVLAQLIWSRALGFPLERPKSMSTDGLMKFVDSK

SEQ ID NO: 12 - protein, 1500 aa, Homo sapiens
MTRILTAFKVVRTLKTGFGFTNVTAHQKWKFSRPGIRLLSVKAQTAHIVLEDGTKMKGYSFGHPSSVAGEVVFNTGLGGYPEAITDPAYKGQILTMANPIIGNGGAPDTTALDELGLSKYLESNGIKVSGLLVLDYSKDYNHWLATKSLGQWLQEEKVPAIYGVDTRMLTKIIRDKGTMLGKIEFEGQPVDFVDPNKQNLIAEVSTKDVKVYGKGNPTKVVAVDCGIKNNVIRLLVKRGAEVHLVPWNHDFTKMEYDGILIAGGPGNPALAEPLIQNVRKILESDRKEPLFGISTGNLITGLAAGAKTYKMSMANRGQNQPVLNITNKQAFITAQNHGYALDNTLPAGWKPLFVNVNDQTNEGIMHESKPFFAVQFHPEVTPGPIDTEYLFDSFFSLIKKGKATTITSVLPKPALVASRVEVSKVLILGSGGLSIGQAGEFDYSGSQAVKAMKEENVKTVLMNPNIASVQTNEVGLKQADTVYFLPITPQFVTEVIKAEQPDGLILGMGGQTALNCGVELFKRGVLKEYGVKVLGTSVESIMATEDRQLFSDKLNEINEKIAPSFAVESIEDALKAADTIGYPVMIRSAYALGGLGSGICPNRETLMDLSTKAFAMTNQILVEKSVTGWKEIEYEVVRDADDNCVTVCNMENVDAMGVHTGDSVVVAPAQTLSNAEFQMLRRTSINVVRHLGIVGECNIQFALHPTSMEYCIIEVNARLSRSSALASKATGYPLAFIAAKIALGIPLPEIKNVVSGKTSACFEPSLDYMVTKIPRWDLDRFHGTSSRIGSSMKSVGEVMAIGRTFEESFQKALRMCHPSIEGFTPRLPMNKEWPSNLDLRKELSEPSSTRIYAIAKAIDDNMSLDEIEKLTYIDKWFLYKMRDILNMEKTLKGLNSESMTEETLKRAKEIGFSDKQISKCLGLTEAQTRELRLKKNIHPWVKQIDTLAAEYPSVTNYLYVTYNGQEHDVNFDDHGMMVLGCGPYHIGSSVEFDWCAVSSIRTLRQLGKKTVVVNCNPETVSTDFDECDKLYFEELSLERILDIYHQEACGGCIISVGGQIPNNLAVPLYKNGVKIMGTSPLQIDRAEDRSIFSAVLDELKVAQAPWKAVNTLNEALEFAKSVDYPCLLRPSYVLSGSAMNVVFSEDEMKKFLEEATRVSQEHPVVLTKFVEGAREVEMDAVGKDGRVISHAISEHVEDAGVHSGDATLMLPTQTISQGAIEKVKDATRKIAKAFAISGPFNVQFLVKGNDVLVIECNLRASRSFPFVSKTLGVDFIDVATKVMIGENVDEKHLPTLDHPIIPADYVAIKAPMFSWPRLRDADPILRCEMASTGEVACFGEGIHTAFLKAMLSTGFKIPQKGILIGIQQSFRPRFLGVAEQLHNEGFKLFATEATSDWLNANNVPATPVAWPSQEGQNPSLSSIRKLIRDGSIDLVINLPNNNTKFVHDNYVIRRTAVDSGIPLLTNFQVTKLFAEAVQKSRKVDSKSLFHYRQYSAGKAA

SEQ ID NO: 13 - protein, 572 aa, Mus musculus
MEPRAPRRRHTHQRGYLLTRDPHLNKDLAFTLEERQQLNIHGLLPPCIISQELQVLRIIKNFERLNSDFDRYLLLMDLQDRNEKLFYSVLMSDVEKFMPIVYTPTVGLACQQYSLAFRKPRGLFISIHDKGHIASVLNAWPEDVVKAIVVTDGERILGLGDLGCNGMGIPVGKLALYTACGGVNPQQCLPITLDVGTENEELLKDPLYIGLRHRRVRGPEYDAFLDEFMEAASSKYGMNCLIQFEDFANRNAFRLLNKYRNKYCTFNDDIQGTASVAVAGLLAALRITKNKLSDQTVLFQGAGEAALGIAHLVVMAMEKEGLSKENARKKIWLVDSKGLIVKGRASLTEEKEVFAHEHEEMKNLEAIVQKIKPTALIGVAAIGGAFTEQILKDMAAFNERPIIFALSSPTSKAECSADECYKVTKGRAIFASGSPFDPVTLPDGRTLFPGQGNNSYVFPGVALGVVACGLRHIDDKVFLTTREVISQQVSDKHLQEGRLYPPLNTIRGVSLKIAVKIVQDAYKEKMATVYPEPQNKEEFVSSQMYSTNYDQILPDCYPWPAEVQKIQTKVNQ

SEQ ID NO: 14 - protein, 724 aa, Mus musculus
MAGQWVRTVALLAARRHWRRSSQQQLLGTLKHAPVYSYQCLVVSRSLSSVEYEPKEKTFDKILIANRGEIACRVIKTCKKMGIKTVAIHSDVDASSVHVKMADEAVCVGPAPTSKSYLNMDAIMEAIKKTRAQAVHPGYGFLSENKEFAKRLAAEDVTFIGPDTHAIQAMGDKIESKLLAKRAKVNTIPGFDGVVKDADEAVRIAREIGYPVMIKASAGGGGKGMRIAWDDEETRDGFRFSSQEAASSFGDDRLLIEKFIDNPRHIEIQVLGDKHGNALWLNERECSIQRRNQKVVEEAPSIFLDPETRQAMGEQAVALAKAVKYSSAGTVEFLVDSQKNFYFLEMNTRLQVEHPVTECITGLDLVQEMILVAKGYPLRHKQEDIPISGWAVECRVYAEDPYKSFGLPSIGRLSQYQEPIHLPGVRVDSGIQPGSDISIYYDPMISKLVTYGSDRAEALKRMEDALDNYVIRGVTHNIPLLREVIINTRFVKGDISAKFLSDVYPDGFKGHTLTLSERNQLLAIASSVFVASQLRAQRFQEHSRVPVIRPDVAKWELSVKVHDEDHTVVASNNGPAFTVEVDGSKLNVTSTWNLASPLLSVNVDGTQRTVQCLSREAGGNMSIQFLGTVYKVHILTKLAAELNKFMLEKVPKDTSSTLCSPMPGVVVAVSVKPGDMVAEGQEICVIEAMKMQNSMTAGKMGKVKLVHCKAGDTVGEGDLLVELE

SEQ ID NO: 15 - protein, 703 aa, Homo sapiens
MLSAALRTLKHVLYYSRQCLMVSRNLGSVGYDPNEKTFDKILVANRGEIACRVIRTCKKMGIKTVAIHSDVDASSVHVKMADEAVCVGPAPTSKSYLNMDAIMEAIKKTRAQAVHPGYGFLSENKEFARCLAAEDVVFIGPDTHAIQAMGDKIESKLLAKKAEVNTIPGFDGVVKDAEEAVRIAREIGYPVMIKASAGGGGKGMRIAWDDEETRDGFRLSSQEAASSFGDDRLLIEKFIDNPRHIEIQVLGDKHGNALWLNERECSIQRRNQKVVEEAPSIFLDAETRRAMGEQAVALARAVKYSSAGTVEFLVDSKKNFYFLEMNTRLQVEHPVTECITGLDLVQEMIRVAKGYPLRHKQADIRINGWAVECRVYAEDPYKSFGLPSIGRLSQYQEPLHLPGVRVDSGIQPGSDISIYYDPMISKLITYGSDRTEALKRMADALDNYVIRGVTHNIALLREVIINSRFVKGDISTKFLSDVYPDGFKGHMLTKSEKNQLLAIASSLFVAFQLRAQHFQENSRMPVIKPDIANWELSVKLHDKVHTVVASNNGSVFSVEVDGSKLNVTSTWNLASPLLSVSVDGTQRTVQCLSREAGGNMSIQFLGTVYKVNILTRLAAELNKFMLEKVTEDTSSVLRSPMPGVVVAVSVKPGDAVAEGQEICVIEAMKMQNSMTAGKTGTVKSVHCQAGDTVGEGDLLVELE

SEQ ID NO: 16 - protein, 244 aa, Mus musculus
MKLNFSGLRALVTGAGKGIGRDTVKALHASGAKVVAVTRTNSDLVSLAKECPGIEPVCVDLGDWDATEKALGGIGPVDLLVNNAALVIMQPFLEVTKEAFDRSFSVNLRSVFQVSQMVARDMINRGVPGSIVNVSSMVAHVTFPNLITYSSTKGAMTMLTKAMAMELGPHKIRVNSVNPTVVLTDMGKKVSADPEFARKLKERHPLRKFAEVEDVVNSILFLLSDRSASTSGGGILVDAGYLAS

SEQ ID NO: 17 - protein, 476 aa, Neurospora crassa
MASRRLALNLAQGVKARAGGVINPFRRGLATPHSGTGIKTQTTTLKNGLTVASQYSPYAQTSTVGMWIDAGSRAETDETNGTAHFLEHLAFKGTTKRTQQQLELEIENMGAHLNAYTSRENTVYFAKALNEDVPKCVDILQDILQNSKLEESAIERERDVILRESEEVEKQLEEVVFDHLHATAYQHQPLGRTILGPRENIRDITRTELVNYIKNNYTADRMVLVGAGGVPHEQLVEMADKYFSKLPATAPVSSASILSKKKPDFIGSDIRIRDDTIPTANIAIAVEGVSWSDDDYFTGLVTQAIVGNYDKALGNAPHQGSKLSGFVHKHDLATSFMSFSTSYSDTGLWGIYLVTDKLDRVDDLVHFSLREWTRLCSNVSEAEVERAKAQLKASILLSLDGTTAVAEDIGRQIVTTGRRMSPAEIERIIDAVSAKDVMDFANKKIWDQDIAISAVGSIEGLFDYARIRGDMSRNAF

SEQ ID NO: 18 - protein, 412 aa, Homo sapiens
MAAALLARASGPARRALCPRAWRQLHTIYQSVELPETHQMLLQTCRDFAEKELFPIAAQVDKEHLFPAAQVKKMGGLGLLAMDVPEELGGAGLDYLAYAIAMEEISRGCASTGVIMSVNNSLYLGPILKFGSKEQKQAWVTPFTSGDKIGCFALSEPGNGSDAGAASTTARAEGDSWVLNGTKAWITNAWEASAAVVFASTDRALQNKGISAFLVPMPTPGLTLGKKEDKLGIRGSSTANLIFEDCRIPKDSILGEPGMGFKIAMQTLDMGRIGIASQALGIAQTALDCAVNYAENRMAFGAPLTKLQVIQFKLADMALALESARLLTWRAAMLKDNKKPFIKEAAMAKLAASEAATAISHQAIQILGGMGYVTEMPAERHYRDARITEIYEGTSEIQRLVIAGHLLRSYRS

SEQ ID NO: 19 - protein, 333 aa, Homo sapiens
MFRAAAPGQLRRAASLLRFQSTLVIAEHANDSLAPITLNTITAATRLGGEVSCLVAGTKCDKVAQDLCKVAGIAKVLVAQHDVYKGLLPEELTPLILATQKQFNYTHICAGASAFGKNLLPRVAAKLEVAPISDIIAIKSPDTFVRTIYAGNALCTVKCDEKVKVFSVRGTSFDAAATSGGSASSEKASSTSPVEISEWLDQKLTKSDRPELTGAKVVVSGGRGLKSGENFKLLYDLADQLHAAVGASRAAVDAGFVPNDMQVGQTGKIVAPELYIAVGISGAIQHLAGMKDSKTIVAINKDPEAPIFQVADYGIVADLFKVVPEMTEILKKK

SEQ ID NO: 20 - protein, 482 aa, Homo sapiens
MAAVRMLRTWSRNAGKLICVRYFQTCGNVHVLKPNYVCFFGYPSFKYSHPHHFLKTTAALRGQVVQFKLSDIGEGIREVTVKEWYVKEGDTVSQFDSICEVQSDKASVTITSRYDGVIKKLYYNLDDIAYVGKPLVDIETEALKDSEEDVVETPAVSHDEHTHQEIKGRKTLATPAVRRLAMENNIKLSEVVGSGKDGRILKEDILNYLEKQTGAILPPSPKVEIMPPPPKPKDMTVPILVSKPPVFTGKDKTEPIKGFQKAMVKTMSAALKIPHFGYCDEIDLTELVKLREELKPIAFARGIKLSFMPFFLKAASLGLLPFPILNASVDENCQNITYKASHNIGIAMDTEQGVIVPNVKNVQICSIFDIATELNRLQKLGSVGQLSTTDLTGGTFTLSNIGSIGGTFAKPVIMPPEVAIGALGSIKAIPRFNQKGEVYKAQIMNVSWSADHRVIDGATMSRFSNLWKSYLENPAFMLLDLK

SEQ ID NO: 21 - protein, 573 aa, Homo sapiens
MLRLPTVFRQMRPVSRVLAPHLTRAYAKDVKFGADARALMLQGVDLLADAVAVTMGPKGRTVIIEQSWGSPKVTKDGVTVAKSIDLKDKYKNIGAKLVQDVANNTNEEAGDGTTTATVLARSIAKEGFEKISKGANPVEIRRGVMLAVDAVIAELKKQSKPVTTPEEIAQVATISANGDKEIGNIISDAMKKVGRKGVITVKDGKTLNDELEIIEGMKFDRGYISPYFINTSKGQKCEFQDAYVLLSEKKISSIQSIVPALEIANAHRKPLVIIAEDVDGEALSTLVLNRLKVGLQVVAVKAPGFGDNRKNQLKDMAIATGGAVFGEEGLTLNLEDVQPHDLGKVGEVIVTKDDAMLLKGKGDKAQIEKRIQEIIEQLDVTTSEYEKEKLNERLAKLSDGVAVLKVGGTSDVEVNEKKDRVTDALNATRAAVEEGIVLGGGCALLRCIPALDSLTPANEDQKIGIEIIKRTLKIPAMTIAKNAGVEGSLIVEKIMQSSSEVGYDAMAGDFVNMVEKGIIDPTKVVRTALLDAAGVASLLTTAEVVVTEIPKEEKDPGMGAMGGMGGGMGGGMF

SEQ ID NO: 22 - protein, 577 aa, Neurospora crassa
MLNRFRPARLVAQSSRCLPLTRARAGPLPVNNARTLATRAAAVNTKEPTERDNITTLSNGVRVASEDLPDAFSGVGVYIDAGSRYENDYVRGASHIMDRLAFKSTSTRTADEMLETVEKLGGNIQCASSRESMMYQAATFNKAIPTAVELMAETIRDPKLTDEELEGQIMTAQYEVNEIWSKAELILPELVHMAAFKDNTLGNPLLCPKERLDYINRDVIQTYRDAFYRPERLVVAFAGVPHERAVKLAEKYFGDMKASDAPGLSRTGSETSVDSLVSESSEASSESSSSSSDSSESSGGLLSKLFSPKAKKATPNPFLTRVPISTEDLTRPAHYTGGFLTLPSQPPPLNPNLPTFTHIQLAFEGLAISDDDIYALATLQTLLGGGGSFSAGGPGKGMYSRLYTNVLNQHGWVESCVAFNHSYTDSGLFGIAASCYPGRTLPMLQVMCRELHALTTDHGYSALGELEVSRAKNQLRSSLLMNLESRMVELEDLGRQVQVHGRKIPVREMTRRINELTVKDLRRVAKRVVGGMANNAGQGSGAPTVVLQEATVQGLKTTELGWDQIQDTIAQWKLGRR

SEQ ID NO: 23 - protein, 423 aa, Homo sapiens
MATATRLLGWRVASWRLRPPLAGFVSQRAHSLLPVDDAINGLSEEQRQLRQTMAKFLQEHLAPKAQEIDRSNEFKNLREFWKQLGNLGVLGITAPVQYGGSGLGYLEHVLVMEEISRASGAVGLSYGAHSNLCINQLVRNGNEAQKEKYLPKLISGEYIGALAMSEPNAGSDVVSMKLKAEKKGNHYILNGNKFWITNGPDADVLIVYAKTDLAAVPASRGITAFIVEKGMPGFSTSKKLDKLGMRGSNTCELIFEDCKIPAANILGHENKGVYVLMSGLDLERLVLAGGPLGLMQAVLDHTIPYLHVREAFGQKIGHFQLMQGKMADMYTRLMACRQYVYNVAKACDEGHCTAKDCAGVILYSAECATQVALDGIQCFGGNGYINDFPMGRFLRDAKLYEIGAGTSEVRRLVIGRAFNADFH

SEQ ID NO: 24 - protein, 392 aa, Homo sapiens
MAVVAAAAGWLLRLRAAGAEGHWRRLPGAGLARGFLHPAATVEDAAQRRQVAHFTFQPDPEPREYGQTQKMNLFQSVTSALDNSLAKDPTAVIFGEDVAFGGVFRCTVGLRDKYGKDRVFNTPLCEQGIVGFGIGIAVTGATAIAEIQFADYIFPAFDQIVNEAAKYRYRSGDLFNCGSLTIRSPWGCVGHGALYHSQSPEAFFAHCPGIKVVIPRSPFQAKGLLLSCIEDKNPCIFFEPKILYRAAAEEVPIEPYNIPLSQAEVIQEGSDVTLVAWGTQVHVIREVASMAKEKLGVSCEVIDLRTIIPWDVDTICKSVIKTGRLLISHEAPLTGGFASEISSTVQEECFLNLEAPISRVCGYDTPFPHIFEPFYIPDKWKCYDALRKMINY

SEQ ID NO: 25 - protein, 1000 aa, Homo sapiens
MFHLRTCAAKLRPLTASQTVKTFSQNRPAAARTFQQIRCYSAPVAAEPFLSGTSSNYVEEMYCAWLENPKSVHKSWDIFFRNTNAGAPPATLPESPSLSRGSLAAVAHAQSLVEAQPNVDKLVEDHLAVQSLIRAYQIRGHHVAQLDPLGILDADLDSSVAPLTLSHPQTDLGWMSLTSTRSSTCPPTTFIGGQESALPLREIIRRLEMAYCQHIGVEFMFINDLEQCQWIRQKFETPGIMQFTNEEKRTLLARLVRSTRFEEFLQRKWSSEKRFGLEGCEVLIPALKTIIDKSSENGVDYVIMGMPHRGRLNVLANVIRKELEQIFCQFDSKLEAADEGLRRCEVPPGHVSPQDQSCHRPGTLPCPWWPNPSHLEAADPVVMGKTKAEQFYCGDTEGKKVMSILLHGDAAFAGQGIVYETFHLSDLPSYTTHGTVHVVVNNQIGFTTDPRMARSSPYPTDVARVVNAPIFHVNSDDPEAVMYVCKVAAEWRSTFHKDVVVDLVCYRRNGHNEMDEPMFTQPLMYKQIRKQKPVLQKYAELLVSQGVVNQPEYEEEISKYDKICEEAFARSKDEKILHIKHWLDSPWPGFFTLDGQPRSMSCPSTGLTEDILTHIGNVASSVPVENFTIHGGLSRILKTRGEMVKNRTVDWALAEYMAFGSLLKEGIHIRLSGQDVERGTFSHRHHVLHDQNVDKRTCIPMNHLWPNQAPYTVCNSSLSEYGVLGFGAGLRMASPNALVLWEAQFGDFHNTAQCIIDQFICPGQAKWVRQNGIVLLLPLGMEGMGPEHSSGPPRAFLQMCNDDPDVLPDLKEANFDINQLYDCNWVVVNCSTPGNFFHVLRRQILLPFRKPLIIFTPKSLLRHPEARSSFDEMLPGTHFQRVIPEDGPAAQNPENVKRLLFCTGKVYYDLTRERKARDMVGQVAITRIEHVSPFPFDLLLKEVQKYPNAELAWCQEEHKNQGYYDYVKPRLRTTISRAKPVWYAGRDPAAAPRTGNKKTH

SEQ ID NO: 26 - protein, 584 aa, Homo sapiens
MLSRLRVVSTTCTLACRHLHIKEKGKPLMLNPRTNKGMAFTLQERQMLGLQGLLPPKIETQDIQALRFHRNLKKMTSPLEKYIYIMGIQERNEKLFYRILQDDIESLMPIVYTPTVGLACSQYGHIFRRPKGLFISISDRGHVRSIVDNWPENHVKAVVVTDGERILGLGDLGVYGMGIPVGKLCLYTACAGIRPDRCLPVCIDVGTDNIALLKDPFYMGLYQKRDRTQQYDDLIDEFMKAITDRYGRNTLIQFEDFGNHNAFRFLRKYREKYCTFNDDIQGTAAVALAGLLAAQKVISKPISEHKILFLGAGEAALGIANLIVMSMVENGLSEQEAQKKIWMFDKYGLLVKGRKAKIDSYQEPFTHSAPESIPDTFEDAVNILKPSTIIGVAGAGRLFTPDVIRAMASINERPVIFALSNPTAQAECTAEEAYTLTEGRCLFASGSPFGPVKLTDGRVFTPGQGNNVYIFPGVALAVILCNTRHISDSVFLEAAKALTSQLTDEELAQGRLYPPLANIQEVSINIAIKVTEYLYANKMAFRYPEPEDKAKYVKERTWRSEYDSLLPDVYEWPESASSPPVITE

SEQ ID NO: 27 - protein, 496 aa, Homo sapiens
MASRCWRWWGWSAWPRTRLPPAGSTPSFCHHFSTQEKTPQICVVGSGPAGFYTAQHLLKHPQAHVDIYEKQPVPFGLVRFGVAPDHPEVKNVINTFTQTAHSGRCAFWGNVEVGRDVTVPELQEAYHAVVLSYGAEDHRALEIPGEELPGVCSARAFVGWYNGLPENQELEPDLSCDTAVILGQGNVALDVARILLTPPEHLEALLLCQRTDITLAALGVLRQSRVKTVWLVGRRGPLQVAFTILELREMIQLPGARPILDPVDFLGLQDKIKEVPRPRKRLTELLLRTATEKPGPAEAARQASASRAWGLRFFRSPQQVLPSPDGRRAAGVRLAVTRLEGVDEATRAVPTGDMEDLPCGLVLSSIGYKSRPVDPSVPFDSKLGVIPNVEGRVMDVPGLYCSGWVLRGPTGVIATTMTDSFLTGQMLLQDLKAGLLPSGPRPGYAAIQALLSSRGVRPVSFSDWKLDAEEVARGQGTGKPREKLVDPQGMLRLLGH

SEQ ID NO: 28 - protein, 430 aa, Homo sapiens [sequence omitted]

SEQ ID NO: 29 - protein, 517 aa, Homo sapiens [sequence omitted]

SEQ ID NO: 30 - protein, 207 aa, Homo sapiens
MLALRCGSRWLGLLSVPRSVPLRLPAARACSKGSGDPSSSSSSGNPLVYLDVDANGKPLGRVVLELKADVVPKTAENFRALCTGEKGFGYKGSTFHRVIPSFMCQAGDFTNHNGTGGKSIYGSRFPDENFTLKHVGPGVLSMANAGPNTNGSQFFICTIKTDWLDGKHVVFGHVKEGMDVVKKIESFGSKSGRTSKKIVITDCGQLS

SEQ ID NO: 31 - protein, 453 aa, Neurospora crassa
MFSRLAARLPKASALNGVAARQVRNLSQPAITGSKGRNMPAREPRTTAAATGAEATFTIRDGPVFQGTAFGANTNISGEAVFTTSLVGYPESMTDPSYRGQILVFTQPLIGNYGVPSNERDEFNLLSTSSLPTSSAPVSLSPMSLPSTATGLLFRAWASGAPARAFPPLSGVDTRAIVTYLREQGSSLARISIGDEYDADEDEGFIDPGQINLVKRVSTKAPFVVTNPNAKFHVALIDCGVKENILRSLVSRGASVTVFPYNYPIHKVAENFDGVFISNGPGDPTHCQETVYNLAKLMETSPIPIMGICLGHQLLALAVGAKTIKLSMVIRAHNIPALDLTTGQCHITSQNHGYAVDISTLPSDFKEYFVNLNDGSNEGMMHKTRPIFSTQFHPEAKGGPMDSSYLFDKYMENVELFKSNSQVYRDNRPTQFMIDILSKERVGVEPTPLSNAA

SEQ ID NO: 32 - protein, 343 aa, Homo sapiens
GLRPPPPGRFSRLPGKTLSACDRENGARRPLLLGSTSFIPIGRRTYASAAEPVGSKAVLVTGCDSGFGFSLAKHLHSKGFLVFAGCLMKDKGHDGVKELDSLNSDRLRTVQLNVFRSEEVEKVVGDCPFEPEGPEKGMWGLVNNAGISTFGEVEFTSLETYKQVAEVNLWGTVRMTKSFLPLIRRAKGRVVNISSMLGRMANPARSPYCITKFGVEAFSDCLRYEMYPLGVKVSVVEPGNFIAATSLYNPESIQAIAKKMWEELPEVVRKDYGKKYFDEKIAKMETYCSSGSTDTSPVIDAVTHALTATTPYTRYHPMDYYWWLRMQIMTHLPGAISDMIYIR

SEQ ID NO: 33 - protein, 325 aa, Homo sapiens
MAAMRKALPRRLVGLASLRAVSTSSMGTLPKRVKIVEVGPRDGLQNEKNIVSTPVKIKLIDMLSEAGLSVIETTSFVSPKWVPQMGDHTEVLKGIQKFPGINYPVLTPNLKGFEAAVAAGAKEVVIFGAASELFTKKNINCSIEESFQRFDAILKAAQSANISVRGYVSCALGCPYEGKISPAKVAEVTKKFYSMGCYEISLGDTIGVGTPGIMKDMLSAVMQEVPLAALAVHCHDTYGQALANTLMALQMGVSVVDSSVAGLGGCPYAQGASGNLATEDLVYMLEGLGIHTGVNLQKLLEAGNFICQALNRKTSSKVAQATCKL

SEQ ID NO: 34 - protein, 1178 aa, Mus musculus
MLKFQTVRGGLRLLGVRRSSSAPVASPNVRRLEYKPIKKVMVANRGEIAIRVFRACTELGIRTVAVYSEQDTGQMHRQKADEAYLIGRGLAPVQAYLHIPDIIKVAKENGVDAVHPGYGFLSERADFAQACQDAGVRFIGPSPEVVRKMGDKVEARAIAIAAGVPVVPGTDSPISSLHEAHEFSNTFGFPIIFKAAYGGGGRGMRVVHSYEELEENYTRAYSEALAAFGNGALFVEKFIEKPRHIEVQILGDQYGNILHLYERDCSIQRRHQKVVEIAPATHLDPQLRSRLTSDSVKLAKQVGYENAGTVEFLVDKHGKHYFIEVNSRLQVEHTVTEEITDVDLVHAQIHVSEGRSLPDLGLRQENIRINGCAIQCRVTTEDPARSFQPDTGRIEVFRSGEGMGIRLDNASAFQGAVISPHYDSLLVKVIAHGKDHPTAATKMSRALAEFRVRGVKTNIPFLQNVLNNQQFLAGTVDTQFIDENPELFQLRPAQNRAQKLLHYLGHVMVNGPTTPIPVNVSPSPVDPAVPVVPIGPPPAGFRDILLREGPEGFARAVRNHQGLLLMDTTFRDAHQSLLATRVRTHDLKKIAPYVAHNFNKLFSMENWGGATFDVAMRFLYECPWRRLQELRELIPNIPFQMLLRGANAVGYTNYPDNVVFKFCEVAKENGMDVFRVFDSLNYLPNMLLGMEAAGSAGGVVEAAISYTGDVADPSRTKYSLEYYMGLAEELVRAGTHILCIKDMAGLLKPAACTMLVSSLRDRFPDLPLHIHTHDTSGAGVAAMLACAQAGADVVDVAVDSMSGMTSQPSMGALVACTKGTPLDTEVPLERVFDYSEYWEGARGLYAAFDCTATMKSGNSDVYENEIPGGQYTNLHFQAHSMGLGSKFKEVKKAYVEANQMLGDLIKVTPSSKIVGDLAQFMVQNGLSRAEAEAQAEELSFPRSVVEFLQGYIGIPHGGFPEPFRSKVLKDLPRIEGRPGASLPPLNLKELEKDLIDRHGEEVTPEDVLSAAMYPDVFAQFKDFTATFGPLDSLNTRLFLQGPKIAEEFEVELERGKTLHIKALAVSDLNRAGQRQVFFELNGQLRSILVKDTQAMKEMHFHPKALKDVKGQIGAPMPGKVIDIKVAAGDKVAKGQPLCVLSAMKMETVVTSPMEGTIRKVHVTKDMTLEGDDLILEIE

SEQ ID NO: 35 - protein, 539 aa, Homo sapiens
MAAALRVAAVGARLSVLASGLRAAVRSLCSQATSVNERIENKRRTALLGGGQRRIDAQHKRGKLTARERISLLLDPGSFVESDMFVEHRCADFGMAADKNKFPGDSVVTGRGRINGRLVYVFSQDFTVFGGSLSGAHAQKICKIMDQAITVGAPVIGLNDSGGARIQEGVESLAGYADIFLRNVTASGVIPQISLIMGPCAGGAVYSPALTDFTFMVKDTSYLFITGPDVVKSVTNEDVTQEELGGAKTHTTMSGVAHRAFENDVDALCNLRDFFNYLPLSSQDPAPVRECHDPSDRLVPELDTIVPLESTKAYNMVDIIHSVVDEREFFEIMPNYAKNIIVGFARMNGRTVGIVGNQPKVASGCLDINSSVKGARFVRFCDAFNIPLITFVDVPGFLPGTAQEYGGIIRHGAKLLYAFAEATVPKVTVITRKAYGGAYDVMSSKHLCGDTNYAWPTAEIAVMGAKGAVEIIFKGHENVEAAQAEYIEKFANPFPAAVRGFVDDIIQPSSTRARICCDLDVLASKKVQRPWRKHANIPL

SEQ ID NO: 36 - protein, 558 aa, Homo sapiens
MYRYLAKALLPSRAGPAALGSAANHSAALLGRGRGQPAAASQPGLALAARRHYSELVADREDDPNFFKMVEGFFDRGASIVEDKLVKDLRTQESEEQKRNRVRGILRIIKPCNHVLSLSFPIRRDDGSWEVIEGYRAQHSQHRTPCKGGIRYSTDVSVDEVKALASLMTYKCAVVDVPFGGAKAGVKINPKNYTENELEKITRRFTMELAKKGFIGPGVDVPAPDMNTGEREMSWIADTYASTIGHYDINAHACVTGKPISQGGIHGRISATGRGVFHGIENFINEASYMSILGMTPGFRDKTFVVQGFGNVGLHSMRYLHRFGAKCIAVGESDGSIWNPDGIDPKELEDFKLQHGSILGFPKAKPYEGSILEVDCDILIPAATEKQLTKSNAPRVKAKIIAEGANGPTTPEADKIFLERNILVIPDLYLNAGGVTVSYFEWLKNLNHVSYGRLTFKYERDSNYHLLLSVQESLERKFGKHGGTIPIVPTAEFQDSISGASEKDIVHSALAYTMERSARQIMHTAMKYNLGLDLRTAAYVNAIEKVFKVYSEAGVTFT

SEQ ID NO: 37 - protein, 102 aa, Mus musculus
MAGQAFRKFLPLFDRVLVERSAAETVTKGGIMLPEKSQGKVLQATVVAVGSGGKGKSGEIEPVSVKVGDKVLLPEYGGTKVVLDDKDYFLFRDSDILGKYVD

SEQ ID NO: 38 - protein, 432 aa, Homo sapiens
MEGLAVRLLRGSRLLRRNFLTCLSSWKIPPHVSKSSQSEALLNITNNGIHFAPLQTFTDEEMMIKSSVKKFAQEQIAPLVSTMDENSKMEKSVIQGLFQQGLMGIEVDPEYGGTGASFLSTVLVIEELAKVDASVAVFCEIQNTLINTLIRKHGTEEQKATYLPQLTTEKVGSFCLSEAGAGSDSFALKTRADKEGDYYVLNGSKMWISSAEHAGLFLVMANVDPTIGYKGITSFLVDRDTPGLHIGKPENKLGLRASSTCPLTFENVKVPEANILGQIGHGYKYAIGSLNEGRIGIAAQMLGLAQGCFDYTIPYIKERIQFGKRLFDFQGLQHQVAHVATQLEAARLLTYNAARLLEAGKPFIKEASMAKYYASEIAGQTTSKCIEWMGGVGYTKDYPVEKYFRDAKIGTIYEGASNIQLNTIAKHIDAEY

SEQ ID NO: 39 - protein, 302 aa, Homo sapiens
MALVASVRVPARVLLRAGARLPGAALGRTERAAGGGDGARRFGSQRVLVEPDAGAGVAVMKFKNPPVNSLSLEFLTELVISLEKLENDKSFRGVILTSDRPGVFSAGLDLTEMCGRSPAHYAGYWKAVQELWLRLYQSNLVLVSAINGACPAGGCLVALTCDYRILADNPRYCIGLNETQLGIIAPFWLKDTLENTIGHRAAERALQLGLLFPPAEALQVGIVDQVVPEEQVQSTALSAIAQWMAIPDHARQLTKAMMRKATASRLVTQRDADVQNFVSFISKDSIQKSLQMYLERLKEEKG

SEQ ID NO: 40 - protein, 421 aa, Mus musculus [sequence omitted]

SEQ ID NO: 41 - DNA, 429 bp, Homo sapiens
aagcgcgtcaggaggcattcatccgggcacttcataagggatccgcagctgctcccgctctccagaaagacagcaagaagcgagtattttccggcattcaacctacaggaatcctccacctgggcaattacctgggagccattgagagctgggtgaggttacaggatgaatatgactctgtattatacagcattgttgacctccactccattactgtcccccaagacccagctgtccttcggcagacatcctggacatgactgctgttcttcttgcctgtggataaacccggaaaaaagcatccttttccaacaatctcaggtgtctgaacacacacaattaagttggatcctttcctgcatggtcagactacctcgattacaacatttacatcagtggaaggcaaagactaccaagcagaagcacgat

SEQ ID NO: 42 - protein, 518 aa, Homo sapiens
MAASMARRLWPLLTRRGFRPRGGCISNDSPRRSFTTEKRNRNLLYEYAREGYSALPQLDIERFCACPEEAAHALELRKGELRSADLPAIISTWQELRQLQEQIRSLEEEKAAVTEAVRALLANQDSGEVQQDPKYQGLRARGREIRKELVHLYPREAQLEEQFYLQALKLPNQTHPDVPVGDESQARVLHMVGDKPVFSFQPRGHLEIGEKLDIIRQKRLSHVSGHRSYYLRGAGALLQHGLVNFTFNKLLRRGFTPMTVPDLLRGAVFEGCGMTPNANPSQIYNIDPARFKDLNLAGTAEVGLAGYFMDHTVAFRDLPVRMVCSSTCYRAETNTGQEPRGLYRVHHFTKVEMFGVTGPGLEQSSQLLEEFLSLQMEILTELGLHFRVLDMPTQELGLPAYRKFDIEAWMPGRGRFGEVTSASNCTDFQSRRLHIMFQTEAGELQFAHTVNATACAVPRLLIALLESNQQKDGSVLVPPALQSYLGTDRITAPTHVPLQYIGPNQPRKPGLPGQPAVS

SEQ ID NO: 43 - protein, 430 aa, Mus musculus
MAARLLLRSLRVLKARSAPRPPPSARCSHSGAEARLETPSAKKLTDVGIRRIFSSEHDIFRESVRKFFQEEVIPHHTEWEKAGEVSREVWEKAGKQGLLGINIAEKHGGIGGDLLSTAVTWEEQAYSNCTGPGFSLHSDIVMPYIANYGTKEQIEKFIPQMTAGKCIGAIAMTEPGAGSDLQGVRTNAKRSGSDWILNGSKVFITNGWLSDLVIVVAVTNREARSPAHGISLFLVENGMKGFIKGRKLHKMGMKAQDTAELFFEDVRLPANALLGEENKGFYYLMQELPQERLLIAELAISACEFMFEETRNYVKQRKAFGKTVAHIQTVQHKLAELKTHICVTRAFVDSCLQLHETKRLDSGSASMAKYWASELQNSVAYECVQLHGGWGYMWEYPIAKAYVDARVQPIYGGTNEIMKELIARQIVSDS

SEQ ID NO: 44 - protein, 466 aa, Homo sapiens
MALLTAAARLLGTKNASCLVLAARHASASSTNLKDILADLIPKEQARIKTFRQQHGKTVVGQITVDMMYGGMRGMKGLVYETSVLDPDEGIRFRGFSIPECQKLLPKAKGGEEPLPEGLFWLLVTGCIPTEEQVSWLSKEWAKRAALPSHVVTMLDNFPTNLHPMSQLSAAVTALNSESNFAQAYARGISRTKYWELIYEDSVDLIAKLPCVAAKIYRNLYWEGSGIGAIDSNLDWSHNFTNMLGYTDHQFTELMRLYLTIHSDHEGGNVSAHTSHLVGSALSDPYLSFAAAMNGLAGPLHGLANQEVLVWLTQLQKEVGKDVSDEKLRDYIWNTLNSGRVVPGYGHAVLRKTDPRYTCQREFALKHLPNDPMFKLVAQLYKIVPNVLLEQGKAKNPWPNVDAHSGVLLQYYGMTEMNYYTVLFGVSRALGVLAQLIWSRALGFPLERPKSMSTEGLMKFVDSKSG

SEQ ID NO: 45 - protein, 451 aa, Homo sapiens
MVGSALRRGAHAYVYLVSKASHISRGHQHQAWGSRPPAAECATQRAPGSVVELLGKSYPQDDHSNLTRKVLTRVGRNLHNQQHHPLWLIKERVKEHFYKQYVGRFGTPLFSVYDNLSPVVTTWQNFDSLLIPADHPSRKKGDNYYLNRTHMLRAHTSAHQWDLLHAGLDAFLVVGDVYRRDQIDSQHYPIFHQLEAVRLFSKHELFAGIKDGESLQLFEQSSRSAHKQETHTMEAVKLVEFDLKQTLTRLMAHLFGDELEIRWVDCYFPFTHPSFEMEINFHGEWLEVLGCGVMEQQLVNSAGAQDRIGWAFGLGLERLAMILYDIPDIRLFWCEDERFLKQFCVSNINQKVKFQPLSKYPAVINDISFWLPSENYAENDFYDLVRTIGGDLVEKVDLIDKFVHPKTHKTSHCYRITYRHMERTLSQREVRHIHQALQEAAVQLLGVEGRF

SEQ ID NO: 46 - protein, 213 aa, Homo sapiens
MAAPAVSGLSRQVRCFSTSVVRPFAKLVRPPVQVYGIEGRYATALYSAASKQNKLEQVEKELLRVAQILKEPKVAASVLNPYVKRSIKVKSLNDITAKERFSPLTTNLINLLAENGRLSNTQGVVSAFSTMMSVHRGEVPCTVTSASPLEEATLSELKTVLKSFLSQGQVLKLEAKTDPSILGGMIVRIGEKYVDMSVKTKIQKLGRAMREIV

SEQ ID NO: 47 - protein, 184 aa, Homo sapiens
MAAAGGARLLRAASAVLGGPAGRWLHHAGSRAGSSGLLRNRGPGGSAEASRSLSVSARARSSSEDKITVHFINRDGETLTTKGKVGDSLLDVVVENNLDIDGFGACEGTLACSTCHLIFEDHIYEKLDAITDEENDMLDLAYGLTDRSRLGCQICLTKSMDNMTVRVPETVADARQSIDVGKTS

SEQ ID NO: 48 - protein, 105 aa, Homo sapiens
MGDVEKGKKIFIMKCSQCHTVEKGGKHKTGPNLHGLFGRKTGQAPGYSYTAANKNKGIIWGEDTLMEYLENPKKYIPGTKMIFVGIKKKEERADLIAYLKKATNE

SEQ ID NO: 49 - protein, 108 aa, Neurospora crassa
MGFSAGDSKKGANLFKTRCAQCHTLEEGGGNKIGPALHGLFGRKTGSVDGYAYTDANKQKGITWDENTLFEYLENPKKYIPGTKMAFGGLKKDKDRNDIITFMKEATA

SEQ ID NO: 50 - protein, 903 aa, Homo sapiens
MASVWQRLGFYASLLKRQLNGGPDVIKWERRVIPGCTRSIYSATGKWTKEYTLQTRKDVEKWWHQRIKEQASKISEADKSKPKFYVLSMFPYPSGKLHMGHVRVYTISDTIARFQKMRGMQVINPMGWDAFGLPAENAAVERNLHPQSWTQSNIKHMRKQLDRLGLCFSWDREITTCLPDYYKWTQYLFIKLYEAGLAYQKEALVNWDPVDQTVLANEQVDEHGCSWRSGAKVEQKYLRQWFIKTTAYAKAMQDALADLPEWYGIKGMQAHWIGDCVGCHLDFTLKVHGQATGEKLTAYTATPEAIYGTSHVAISPSHRLLHGHSSLKEALRMALVPGKDCLTPVMAVNMLTQQEVPVVILAKADLEGSLDSKIGIPSTSSEDTILAQTLGLAYSEVIETLPDGTERLSSSAEFTGMTRQDAFLALTQKARGKRVGGDVTSDKLKDWLISRQRYWGTPIPIVHCPVCGPTPVPLEDLPVTLPNIASFTGKGGPPLAMASEWVNCSCPRCKGAAKRETDTMDTFVDSAWYYFRYTDPHNPHSPFNTAVADYWMPVDLYIGGKEHAVMHLFYARFFSHFCHDQKMVKHREPFHKLLAQGLIKGQTFRLPSGQYLQREEVDLTGSVPVHAKTKEKLEVTWEKMSKSKHNGVDPEEVVEQYGIDTIRLYILFAAPPEKDILWDVKTDALPGVLRWQQRLWTLTTRFIEARASGKSPQPQLLSNKEKAEARKLWEYKNSVISQVTTHFTEDFSLNSAISQLMGLSNALSQASQSVILHSPEFEDALCALMVMAAPLAPHVTSEIWAGLALVPRKLCAHYTWDASVLLQAWPAVDPEFLQQPEVVQMAVLINNKACGKIPVPQQVARDQDKVHEFVLQSELGVRLLQGRSIKKSFLSPRTALINFLVQD

SEQ ID NO: 51 - protein, 103 aa, Homo sapiens
MWRVCARRAQNVAPWAGLEARWTALQEVPGTPRVTSRSGPAPVRRNSVTTGYGGVRALCGWTPSSGATPRNRLLLQLLGSPGRRYYSLPPHQKVPLPSLSPTM

SEQ ID NO: 52 - protein, 102 aa, Mus musculus; identical to SEQ ID NO: 37

SEQ ID NO: 53 - protein, 568 aa, Caenorhabditis elegans
MLRLARKGLQTAVVRSYAKDVKFGAEGRQAMLVGVNLLADAVSVTMGPKGRNVIIEQSWGSPKITKDGVTVAKSIDLKDKYQNLGAKLIQDVANKANEEAGDGTTCATVLARAIAKEGFESIRQGGNAVEIRRGVMNAVEVVVAELKKISKKVTTPEEIAQVATISANGDTVVGNLISDAMKKVGTTGVITVKDGKTLNDELELIEGMKFDRGYISPYFITSAKGAKVEYEKALVLLSEKKISQVQDIVPALELANKLRRPLVIIAEDVDGEALTTLVLNRLKVGLQVVAIKAPGFGDNRKNTLKDMGIATGATIFGDDSNLIKIEDITANDLGEVDEVTITKDDTLLLRGRGDQTEIEKRIEHITDEIEQSTSDYEKEKLNERLAKLSKGVAVLKIGGGSEVEVGEKKDRVTDALCATRAAVEEGIVPGGGVALLRSLTALKNYKAANEDQQIGVNIVKKALTQPIATIVKNAGLEPSSIIDEVTGNSNTSYGYDALNGKFVDMFEAGIIDPTKVVRTALQDASGVASLLATTECVVTEIPKEEAVGGPAGGMGGMGGMGGMGGMGF

SEQ ID NO: 54 - protein, 517 aa, Homo sapiens
MLRAAARFGPRLGRRLLSAAATQAVPAPNQQPEVFCNQIFINNEWHDAVSRKTFPTVNPSTGEVICQVAEGDKEDVDKAVKAARAAFQLGSPWRRMDASHRGRLLNRLADLIERDRTYLAALETLDNGKPYVISYLVDLDMVLKCLRYYAGWADKYHGKTIPIDGDFFSYTRHEPVGVCGQIIPWNFPLLMQAWKLGPALATGNVVVMKVAEQTPLTALYVANLIKEAGFPPGVVNIVPGFGPTAGAAIASHEDVDKVAFTGSTEIGRVIQVAAGSSNLKRVTLELGGKSPNIIMSDADMDWAVEQAHFALFFNQGQCCCAGSRTFVQEDIYDEFVERSVARAKSRVVGNPFDSKTEQGPQVDETQFKKILGYINTGKQEGAKLLCGGGIAADRGYFIQPTVFGDVQDGMTIAKEEIFGPVMQILKFKTIEEVVGRANNSTYGLAAAVFTKDLDKANYLSQALQAGTVWVNCYDVFGAQSPFGGYKMSGSGRELGEYGLQAYTEVKTVTVKVPQKNS

SEQ ID NO: 55 - protein, 558 aa, Homo sapiens
MYRYLGEALLLSRAGPAALGSASADSAALLGWARGQPAAAPQPGLALAARRHYSEAVADREDDPNFFKMVEGFFDRGASIVEDKLVEDLRTRESEEQKRNRVRGILRIIKPCNHVLSLSFPIRRDDGSWEVIEGYRAQHSQHRTPCKGGIRYSTDVSVDEVKALASLMTYKCAVVDVPFGGAKAGVKINPKNYTDNELEKITRRFTMELAKKGFIGPGIDVPAPDMSTGEREMSWIADTYASTIGHYDINAHACVTGKPISQGGIHGRISATGRGVFHGIENFINEASYMSILGMTPGFGDKTFVVQGFGNVGLHSMRYLHRFGAKCIAVGESDGSIWNPDGIDPKELEDFKLQHGSILGFPKAKPYEGSILEADCDILIPAASEKQLTKSNAPRVKAKIIAEGANGPTTPEADKIFLERNIMVIPDLYLNAGGVTVSYFEWLKNLNHVSYGRLTFKYERDSNYHLLMSVQESLERKFGKHGGTIPIVPTAEFQDRISGASEKDIVHSGLAYTMERSARQIMRTAMKYNLGLDLRTAAYVNAIEKVFKVYNEAGVTFT

SEQ ID NO: 56 - protein, 509 aa, Homo sapiens; identical to SEQ ID NO: 9

SEQ ID NO: 57 - protein, 390 aa, Homo sapiens
MRKMLAAVSRVLSGASQKPASRVLVASRNFANDATFEIKKCDLHRLEEGPPVTTVLTREDGLKYYRMMQTVRRMELKADQLYKQKIIRGFCHLCDGQEACCVGLEAGINPTDHLITAYRAHGFTFTRGLSVREILAELTGRKGGCAKGKGGSMHMYAKNFYGGNGIVGAQVPLGAGIALACKYNGKDEVCLTLYGDGAANQGQIFEAYNMAALWKLPCIFICENNRYGMGTSVERAAASTDYYKRGDFIPGLRVDGMDILCVREATRFAAAYCRSGKGPILMELQTYRYHGHSMSDPGVSYRTREEIQEVRSKSDPIMLLKDRMVNSNLASVEELKEIDVEVRKEIEDAAQFATADPEPPLEELGYHIYSSDPPFEVRGANQWIKFKSVS

SEQ ID NO: 58 - protein, 359 aa, Homo sapiens
MAAVSGLVRRPLREVSGLLKRRFHWTAPAALQVTVRDAINQGMDEELERDEKVFLLGEEVAQYDGAYKVSRGLWKKYGDKRIIDTPISEMGFAGIAVGAAMAGLRPICEFMTFNFSMQAIDQVINSAAKTYYMSGGLQPVPIVFRGPNGASAGVAAQHSQCFAAWYGHCPGLKVVSPWNSEDAKGLIKSAIRDNNPVVVLENELMYGVPFEFPPEAQSKDFLIPIGKAKIERQGTHITVVSHSRPVGHCLEAAAVLSKEGVECEVINMRTIRPMDMETIEASVMKTNHLVTVEGGWPQFGVGAEICARIMEGPAFNFLDAPAVRVTGADVPMPYAKILEDNSIPQVKDIIFAIKKTLNI

SEQ ID NO: 59 - protein, 388 aa, Homo sapiens
MLAAFISRVLRRVAQKSARRVLVASRNSSNDATFEIKKCDLYLLEEGPPVTTVLTRAEGLKYYRMMLTVRRMELKADQLYKQKFIRGFCHLCDGQEACCVGLEAGINPSDHVITSYRAHGVCYTRGLSVRSILAELTGRRGGCAKGKGGSMHMYTKNFYGGNGIVGAQGPLGAGIALACKYKGNDEICLTLYGDGAANQGQIAEAFNMAALWKLPCVFICENNLYGMGTSTERAAASPDYYKRGNFIPGLKVDGMDVLCVREATKFAANYCRSGKGPILMELQTYRYHGHSMSDPGVSYRTREEIQEVRSKRDPIIILQDRMVNSKLATVEELKEIGAEVRKEIDDAAQFATTDPEPHLEELGHHIYSSDSSFEVRGANPWIKFKSVS

SEQ ID NO: 60 - protein, 445 aa, Homo sapiens
MAVAIAAARVWRLNRGLSQAALLLLRQPGARGLARSHPPRQQQQFSSLDDKPQFPGASAEFIDKLEFIQPNVISGIPIYRVMDRQGQIINPSEDPHLPKEKVLKLYKSMTLLNTMDRILYESQRQGRISFYMTNYGEEGTHVGSAAALDNTDLVFGQYREAGVLMYRDYPLELFMAQCYGNISDLGKGRQMPVHYGCKERHFVTISSPLATQIPQAVGAAYAAKRANANRVVICYFGEGAASEGDAHAGFNFAATLECPIIFFCRNNGYAISTPTSEQYRGDGIAARGPGYGIMSIRVDGNDVFAVYNATKEARRRAVAENQPFLIEAMTYRIGHHSTSDDSSAYRSVDEVNYWDKQDHPISRLRHYLLSQGWWDEEQEKAWRKQSRRKVMEAFEQAERKPKPNPNLLFSDVYQEMPAQLRKQQESLARHLQTYGEHYPLDHFDK

SEQ ID NO: 61 - protein, 338 aa, Mus musculus
MLSALARPAGAALRRSFSTSAQNNAKVAVLGASGGIGQPLSLLLKNSPLVSRLTLYDIAHTPGVAADLSHIETRANVKGYLGPEQLPDCLKGCDVVVIPAGVPRKPGMTRDDLFNTNATIVATLTAACAQHCPEAMVCIIANPVNSTIPITAEVFKKHGVYNPNKIFGVTTLDIVRANTFVAELKGLDPARVNVPVIGGHAGKTIIPLISQCTPKVDFPQDQLATLTGRIQEAGTEVVKAKAGAGSATLSMAYAGARFVFSLVDAMNGLEGVVECSFVQSKETECTYFSTPLLLGKKGLEKNLGIGKITPFEEKMIAEAIPELKASIKKGEDFVKNMK

SEQ ID NO: 62 - protein, 222 aa, Homo sapiens [sequence omitted]

SEQ ID NO: 63 - protein, 290 aa, Homo sapiens
MAALRVLLSCARGPLRPPVRCPAWRPFASGANFEYIIAEKRGKNNTVGLIQLNRPKALNALCDGLIDELNQALKIFEEDPAVGAIVLTGGDKAFAAGADIKEMQNLSFQDCYSSKFLKHWDHLTQVKKPVIAAVNGYAFGGGCELAMMCDIIYAGEKAQFAQPEILIGTIPGAGGTQRLTRAVGKSLAMEMVLTGDRISAQDAKQAGLVSKICPVETLVEEAIQCAEKIASNSKIVVAMAKESVNAAFEMTLTEGSKLEKKLFYSTFATDDRKEGMTAFVEKRKANFKDQ

SEQ ID NO: 64 - protein, 500 aa, Homo sapiens
MASMLLAQRLACSFQHTYRLLVPGSRHISQAAAKVDVEFDYDGPLMKTEVPGPRSQELMKQLNIIQNAEAVHFFCNYEESRGNYLVDVDGNRMLDLYSQISSVPIGYSHPALLKLIQQPQNASMFVNRPALGILPPENFVEKLRQSLLSVAPKGMSQLITMACGSCSNENALKTIFMWYRSKERGQRGFSKEELETCMINQAPGCPDYSILSFMGAFHGRTMGCLATTHSKAIHKIDIPSFDWPIAPFPRLKYPLEEFVKENQQEEAGCLEEVEDLIVKYRKKKKTVAGIIVEPIQSEGGDNHASDDFFRKLRDIARKHCCAFLVDEVQTGGGCTGKFWAHEHWGLDDPADVMTFSKKMMTGGFFLKEEFRPNAPYRIFNTWLGDPSKNLLLAEVINIIKREDLLNNAAHAGKALLTGLLDLQARYPQFISRVRGRGTFCSFDTPDDSIRNKLILIARNKGVVLGGCGDKSIRFRPTLVFRDHHAHLFLNIFSDILADFK

SEQ ID NO: 65 - protein, 438 aa, Homo sapiens
MALRGVSVRLLSRGPGLHVLRTWVSSAAQTEKGGRTQSQLAKSSRPEFDWQDPLVLEEQLTTDEILIRDTFRTYCQERLMPRILLANRNEVFHREIISEMGELGVLGPTIKGYGCAGVSSVAYGLLARELERVDSGYRSAMSVQSSLVMHPIYAYGSEEQRQKYLPQLAKGELLGCFGLTEPNSGSDPSSMETRAHYNSSNKSYTLNGTKTWITNSPMADLFVVWARCEDGCIRGFLLEKGMRGLSAPRIQGKFSLRASATGMIIMDGVEVPEENVLPGASSLGGPFGCLNNARYGIAWGVLGASEFCLHTARQYALDRMQFGVPLARNQLIQKKLADMLTEITLGLHACLQLGRLKDQDKAAPEMVSLLKRNNCGKALDIARQARDMLGGNGISDEYHVIRHAMNLEAVNTYEGTHDIHALILGRAITGIQAFTASK

SEQ ID NO: 66 - protein, 438 aa, Mus musculus
MSLRGVSAQLLSRRSGLRFPRFPRTWSSAAAHTEKTQIRPAKSSRPVFDWKDPLILEEQLTADEKLIRDTFRNYWQERLMSQILLANRNEVFHRDIVYEMGELGVLGPTIKGYGCAGVSSVAYGLLTRELERVDSGYRSMMSVQSSLVMHPIYTYGSEEQRQKYLPRLAKGELLGCFGLTEPNHGSDPGGMETRARHNPSNQSYTLSGTKTWITNSPVADLFIVWARCEDNCIPGFILEKGMRGSSAPRIEGKFSLRASATGMIIMDSVEVPEENVLPNVSSLAGPFGCLNTARYGITWGVLGAAEFCLHTARQYALDRIQFGVPLARNQLVQKKLADMLTEITLGLHACLQLGRLKDQDKATPEMVSMLKRNNCGKALDIARQARDILGGNGISDEYHVIRHAMNLEAVNTYEGTHDIHALILGRAITGIQAFTVGK

SEQ ID NO: 67 - protein, 298 aa, Caenorhabditis elegans
MFTAKCAMQNIRNVAIVGSGQMGSGIAQVTASSGFNVMLADVNKKALDRAMKAISQSVTHLSKKQKGTDKEKSDFVTLTMSRIKTCNNVSTAVADADLIIEAAIENIDLKRGIFAQIEQSCKKDSILTTNTSSFLLEDVAKGLQDKTRFGGLHFFNPVPVMKLLEVIRSDDTSDETYATLIKFGTAVGKTTVACKDSPGFIVNRLLIPYFFEAARMYERGDASMTDIDEAMKLGAGHPMGPFELADYIGLDTVKFVMDGWAAKYPEVQLFEASPLVDKLVAEGKLGRKTGDGFYSYKK

SEQ ID NO: 68 - protein, 309 aa, Caenorhabditis elegans
MLSSTCTAAVRGLSTTAQLSKINNVTIIGAGLMGSGIAQVSANAKLNVTVVDSNQSALEKAQQGIANSLKRVAKKKHADDAAAQTALVSSVLDRIKMSTNVSDSVKDADLVIEAIVENIDIKRKLFAEVEVAAKPTTLITTNTSSLRLADIGLNLKDKSRFGGLHFFNPVPMMKLLEVVRHTETSDATFNQLVDYGKTVGKTTVACKDTPGFIVNRLLVPYMFEALRLYERGDASMEDIDVAMKLGAGYPMGPFELSDYVGLDTCKFIMDGWHAQYPEEVAFTPSPLLNSLVDSGKNGRKSGEGFYKYK

SEQ ID NO: 69 - protein, 573 aa, Mus musculus
MLRLPTVLRQMRPVSRALAPHLTRAYAKDVKFGADARALMLQGVDLLADAVAVTMGPKGRTVIIEQSWGSPKVTKDGVTVAKSIDLKDKYKNIGAKLVQDVANNTNEEAGDGTTTATVLARSIAKEGFEKISKGANPVEIRRGVMLAVDAVIAELKKQSKPVTTPEEIAQVATISANGDKDIGNIISDAMKKVGRKGVITVKDGKTLNDELEIIEGMKFDRGYISPYFINTSKGQKCEFQDAYVLLSEKKISSVQSIVPALEIANAHRKPLVIIAEDVDGEALSTLVLNRLKVGLQVVAVKAPGFGDNRKNQLKDMAIATGGAVFGEEGLNLNLEDVQAHDLGKVGEVIVTKDDAMLLKGKGDEAHIEKRIQEITEQLDITTSEYEKEKLNERLAKLSDGVAVLKVGGTSDVEVNEKKDRVTDALNATRAAVEEGIVLGGGCALLRCIPALDSLKPANEDQKIGIEIIKRALKIPAMTIAKNAGVEGSLIVEKILQSSSEVGYDAMLGDFVNMVEKGIIDPTKVVRTALLDAAGVASLLTTAEAVVTEIPKEEKDPGMGAMGGMGGGMGGGMF

SEQ ID NO: 70 - protein, 325 aa, Mus musculus
MASVRKAFPRRLVGLTSLRAVSTSSMGTLPKQVKIVEVGPRDGLQNEKSIVPTPVKIRLIDMLSEAGLPVIEATSFVSPNWVPQMADHSDVLKGIQKFPGINYPVLTPNMKGFEEAVAAGAKEVSVFGAVSELFTRKNANCSIEESFQRFAGVMQAAQAASISVRGYVSCALGCPYEGKVSPAKVAEVAKKLYSMGCYEISLGDTIGVGTPGLMKDMLTAVMHEVPVTALGVHCHDTIGQALANTLVALQMGVSVVDSSVAGLGGCPYAKGASGNLATEDLVYMLNGLGIHTGVNLQKLLEAGDFICQALNRKTSSKVAQATCKL

SEQ ID NO: 71 - protein, 134 aa, Mus musculus
VVNCSTPGNFFHVLRRQILLPFRKPLIVFTPKSLLRHPEARTSFDFTEMLPGTHFQRVIPENGPAAQDPHKVKRLLFCTGKVYYDLTRERKARNMEEEVAITRIEQFTLSPFPFDLLLKEAQKYPNAELAWCQE

SEQ ID NO: 72 - protein, 519 aa, Mus musculus
MLRAALTTVRRGPRLSRLLSAAATSAVPAPNHQPEVFCNQIFINNEWHDAVSRKTFPTVNPSTGEVICQVAEGNKEDVDKAVKAARAAFQLGSPWRRMDASDRGRLLYRLADLIERDRTYLAALETLDNGKPYVISYLVDLDMVLKCLRYYAGWADKYHGKTIPIDGDFFSYTRHEPVGVCGQIIPWNFPLLMQAWKLGPALATGNVVVMKVAEQTPLTALYVANLIKEAGFPPGVVNIVPGFGPTAGAAIASHEGVDKVAFTGSTEVGHLIQVAAGSSNLKRVTLELGGKSPNIIMSDADMDWAVEQAHFALFFNQGQCCCAGSRTFVQENVYDEFVERSVARAKSRVVGNPFDSRTEQGPQVDETQFKKILGYIKSGQQEGAKLLCGGGAAADRGYFIQPTVFGDVKDGMTIAKEEIFGPVMQILKFKTIEEVVGRANDSKYGLAAAVFTKDLDKANYLSQALQAGTVWINCYDVFGAQSPFGGYKMSGSGRELGEYGLQAYTEVKTVTVKVPQKNS

SEQ ID NO: 73 - protein, 412 aa, Mus musculus
MAAALLARARGPLRRALGVRDWRRLHTVYQSVELPETHQMLRQTCRDFAEKELVPIAAQLDREHLFPTAQVKKMGELGLLAMDVPEELSGAGLGYLAYSIALEEISRACASTGVIMSVNNSLYLGPILKFGSAQQKQQWITPFTNGDKIGCFALSEPGNGSDAGAASTTAREEGDSWVLNGTKAWITNSWEASATVVFASTDRSRQNKGISAFLVPMPTPGLTLGKKEDKLGIRASSTANLIFEDCRIPKENLLGEPGMGFKIAMQTLDMGRIGIASQALGIAQASLDCAVKYAENRNAFGAPLTKLQNIQFKLADMALALESARLLTWRAAMLKDNKKPFTKESAMRKLAASEAATAISHQAIQILGSMGYVTEMPAERYYRDARITEIYEGTSEIQRLVIAGHLLRSYRS

SEQ ID NO: 74 - protein, 435 aa, Homo sapiens
MAAGFGRCCRVLRSISRFHWRSQHTKANRQREPGLGFSFEFTEQQFTKEFQATARKFAREEIIPVAAEYDKTGEYPVPLIRRAWELGLMNTHIPENCGGLGLGTFDFTACLISEELAYGCTGVQTAIEGNSLGQMPIIIAGNDQQKKKYLGRMTEEPLMCAYCVTEPFTGAGSDVAGIKTKAEKKGDEYIINGQKMWITNGGKANWYFLLARSDPDPKAPANKAFTGFIVFTEADTPGIQIGRKELNMGQRCSDTRGIVFEDVKVPKENVLIGDGAGFKVAMGAFDKTRFTPVVAAGAVGLAQRALDEATKYALERKTFGKLLVEHQAISFMLAEMAMKVELARMSYQRAFTAWEVDSGRRNTYYASIAKAFAGDIANQLATDAVQILGGNGFNTEYPVEKLMRDAKIYQIFTYEGTSQIQRLIVAREHIDKYKN

SEQ ID NO: 75 - protein, 450 aa, Homo sapiens
MRLARLLRGAALAGPGPGLRAAGFSRSFSSDSGSSPASERGVPGQFTVDFYARFSPSPLSMKQFLDFGSVNACEKTSFMFLRQELPVRLANIMKEISLLPDNLLRTFTPSVQLVQSWYIQSLQELLDFKDKSAEDAKAIYDFTDTVIRIRNRHNDVIPTMAQGVIEYFTKESFGVDPVTSQNVQYFLDRFYMSRISIRMLLNQHSLLFGGKGKGSPSHRKHIGSINPNFTCNVLEVIKDGYENARRLCDLYYINSPELELEELNAKSPGQPIQVVYVPSHLYHMVFELFFTKNAMRATMEHHANRGVYPPIQVHVTLGNEDLTVKMSDRGGGVPLRKIDRLFNYMYSTAPFTRPRVETSRAVPLAGFGYGLPISRLYAQYFQGDLKLYSLEGYGTDAVIYIKALSTDSIERFTLPVYNKAAWKHYNTNHEADDWCVPSREPKDMTTFRSA

SEQ ID NO: 76 - protein, 222 aa, Homo sapiens [sequence omitted]

SEQ ID NO: 77 - protein, 421 aa, Homo sapiens
MRWVWALLKNASLAGAPKYIEHFSKFSPSPLSMKQFLDFGSSNACFTEKTSFTFLRQELPVRLANIMKEINLLPDRVLSTPTVQLVQSWYVQSLLDIMEFLDKDPEFTDHRTLSQFTDALVTIRNRHNDVVPTMAQGVLEYKDTYGDDPVSNQNIQYFLDRFYLSRIFTSIRMLINQHTLIFDGSTNPAHPKHIGSIDPNCNVSEVVKDAYDMAKLLCDKYYMASPDLFTEIQEINAANSKQPIHMVYVPSHLYHMLFELFKNAMRATVESHESSLILPPIKVMVALGEFTEDLSIKMSDRGGGVPLRKIERLFSYMYSTAPTPQPGTGGTPLAGFGYGLPISRLYAKYFFTQGDLQLFSMEGFGTDAVIYLKALSTDSVERLPVYNKSAWRHYQTIQEAGDWCVPSTEPKFTNTSTYRVT

SEQ ID NO: 78 - protein, 420 aa, Homo sapiens
MRLFRWLLKQPVPKQIERYSRFSPSPLSIKQFLDFGRDNACEKTSFTYMFLRKELPVRLANTMREVNLLPDNLLNRPSVGLVQSWYMQSFLELLEYENLSPEDPQVPTLDNFLQVLIKVRNRHNDVVPTMAQGVIEYKEKFGFDPFISTNIQYFLDRFYTNRISFRMFTLINQHTLLFGGDTNPVHPKHIGSIDPTCNVADVVKDAYETAKMLCEQYYLVAPELEVEEFTFNAKAPDKPIQVVYVPSHLFHMLFELFKNSMRATVELYEDRKEGYPAVKTLVTLGKEDLFTSIKISDLGGGVPLRKIDRLFNYMYSTAPRPSLEPTRAAPLAGFGYGLPISRLYARYFQGFTDLKLYSMEGVGTDAVIYLKALSSESFERLPVFNKSAWRHYKTTPEADDWSNPSSEPRDAFTSKYKAKQ

SEQ ID NO: 79 - protein, 789 aa, Homo sapiens [sequence omitted]

SEQ ID NO: 80 - protein, 488 aa, homo sapiens
MTILTYPFKNLPTASKWALRFSIRPLSCSSQLRAAPAVQTKTKKTFTLAKPNIRNVVVVDGVRTPFLLSGTSYKDLMPHDLARAALTGLLHRTSVPKEVVDYIIFGFTTVIQEVKTSNVAREAALGAGFSDKTPAHTVTMACISANQAMTTGVGLIASGQCDVIVAGFTGVELMSDVPIRHSRKMRKLMLDLNKAKSMGQRLSLISKFRFNFLAPELPAVSEFSTSETFTMGHSADRLAAAFAVSRLEQDEYALRSHSLAKKAQDEGLLSDVVPFKVPGKDTVTKDNGIFTRPSSLEQMAKLKPAFIKPYGTVTAANSSFLTDGASAMLIMAEEKALAMGYKPKAYLRDFMYVSQDPKDQLLLGPTYATPKVLEKAGLTMNDIDAFEFHEAFSGQILANFKAMDSDWFAFTENYMGRKTKVGLPPLEKFNNWGGSLSLGHPFGATGCRLVMAAANRLRKEGGQYGLVAACFTAAGGQGHAMIVEAYPK

SEQ ID NO: 81 - protein, 1218 aa, Homo sapiens [sequence omitted]

SEQ ID NO: 82 - protein, 324 aa, Homo sapiens
MAFVTRQFMRSVSSSSTASASAKKIIVKHVTVIGGGLMGAGIAQVFTAAATGHTVVLVDQTEDILAKSKKGIEESLRKVAKKKFAENPKAGDEFVEKTLSTIATSFTTDAASVVHSTDLVVEAIVENLKVKNELFKRLDKFAAEHTIFASNTSSLHITSIANATTRQFTDRFAGLHFFNPVPVMKLVEVIKTPMTSQKTFESLVDFSKALGKHPVSCKDTPGFIVNRLFTLVPYLMEAIRLYERGDASKEDIDTAMKLGAGYPMGPFELLDYVGLDTTKFIVDGWHEMDFTAENPLHQPSPSLNKLVAENKFGKKTGEGFYKYK

SEQ ID NO: 83 - protein, 228 aa, Homo sapiens
MASKLLRAVILGPPGSGKGTVCQRIAQNFGLQHLSSGHFLRENIKFTASTEVEGMAKQYIEKSLLVPDHVITRLMMSELENRRGQHWLLDGFPRTLGQAEALDKICFTEVDLVISLNIPFETLKDRLSRRWIHPPSGRVYNLDFNPPHVHGIDDVTGEPLVQQEDDKFTPEAVAARLRQYKDVAKPVIELYKSRGVLHQFSGTETNKIWPYVYTLFSNKITPIQSKEA

SEQ ID NO: 84 - protein, 866 aa, Homo sapiens [sequence omitted]

SEQ ID NO: 85 - protein, 338 aa, Homo sapiens [sequence omitted]

SEQ ID NO: 86 - protein, 505 aa, Homo sapiens
MAAAAARVVLSSAARRRLWGFSESLLIRGAAGRSLYFGENRLRSTFTQAATQVVLNVPETRVTCLESGLRVASEDSGLSTCTVGLWIDAGSRYENEKNNGTAHFLEFTHMAFKGTKKRSQLDLELEIENMGAHLNAYTSREQTVYYAKAFSKDLPRAVEILADIIQNFTSTLGEAEIERERGVILREMQEVETNLQEVVFDYLHATAYQNTALGRTILGPTENIKSISFTRKDLVDYITTHYKGPRIVLAAAGGVSHDELLDLAKFHFGDSLCTHKGEIPALPPCKFTGFTSEIRVRDDKMPLAHLAIAVEAVGWAHPDTICLMVANTLIGNWDRSFGGGMNLSSKLAQLFTTCHGNLCHSFQSFNTSYTDTGLWGLYMVCESSTVADMLHVVQKEWMRLCTSVTESEVARFTARNLLKTNMLLQLDGSTPICEDIGRQMLCYNRRIPIPELEARIDAVNAETIREVCTKYIFTYNRSPAIAAVGPIKQLPDFKQIRSNMCWLRD

SEQ ID NO: 87 - protein, 130 aa, Mus musculus
VVNCSTPGNFFHVLRRQILLPFRKPLIVFTPKSLLRHPEARTSFDEMLPGTHFQRVIPENGPAAQDPHKVKRLLFCTGKVYYDLTRERKARNMEEEVAITRIEQLSPFPFDLLLKEAQKYPNAELAWCQE

SEQ ID NO: 88 - protein, 397 aa, Caenorhabditis elegans
MSLFARQLQSLTASGIRTQQVRLASTEVSFHTKPCKLHKLDNGPNTSVTLNREDALKYYRDMQVIRRMESAAGNLYKEKKIRGFCHLYSGQEACAVGMKAAMTEGDAVITAYRCHGWTWLLGATVTEVLAELTGRVAGNVHGKGGSMHMYTKNFYGGNGIVGAQQPLGAGVALAMKYREQKNVCVTLYGDGAANQGQLFEATNMAKLWDLPVLFVCENNGFGMGTTAERSSASTEYYTRGDYVPGIWVDGMDILAVREATKWAKEYCDSGKGPLMMEMATYRYHGHSMSDPGTSYRTREEIQEVRKTRDPITGFKDRIITSSLATEEELKAIDKEVRKEVDEALKIATSDGVLPPEALYADIYHNTPAQEIRGATIDETIVQPFKTSADVLKSIGRA

SEQ ID NO: 89 - protein, 354 aa, Homo sapiens
MLFNLRILLNNAAFRNGHNFMVRNFRCGQPLQNKVQLKGRDLLTLKNFTGEEIKYMLWLSADLKFRIKQKGEYLPLLQGKSLGMIFEKRSTRTRLSTETGFALLGGHPCFLTTQDIHLGVNESLTDTARVLSSMADAVLARVYKQSDLDTLAKEASIPIINGLSDLYHPIQILADYLTLQEHYSSLKGLTLSWIGDGNNILHSIMMSAAKFGMHLQAATPKGYEPDASVTKLAEQYAKENGTKLLLTNDPLEAAHGGNVLITDTWISMGQEEEKKKRLQAFQGYQVTMKTAKVAASDWTFLHCLPRKPEEVDDEVFYSPRSLVFPEAENRKWTIMAVMVSLLTDYSPQLQKPKF

SEQ ID NO: 90 - protein, 366 aa, Mus musculus
MLSNLRILLNNAALRKGHTSVVRHFWCGKPVQSQVQLKGRDLLTLFTKNFTGEEIQYMLWLSADLKFRIKQKGEYLPLLQGKSLGMIFEKRSTRTRLSTETGFALLFTGGHPSFLTTQDIHLGVNESLTDTARVLSSMTDAVLARVYKQSDLDTLAKEASIPIVNGLFTSDLYHPIQILADYLTLQEHYGSLKGLTLSWIRDGNNILHSIMMSAAKFGMHLQAATPKGFTYEPDPNIVKLAEQYAKENGTKLSMTNDPLEAARGGNVLITDTWISMGQEDEKKKRLQAFFTQGYQVTMKTAKVAASDWTFLHCLPRKPEEVDDEVFYSPRSLVFPEAENRKWTIMAVMVSFTLLTDYSPVLQKPKF

SEQ ID NO: 91 - protein, 392 aa, Homo sapiens
MASHKLLVTPPKALLKPLSIPNQLLLGPGPSNLPPRIMAAGGLQMIGSMSKDMYQIMDEIKEGIQYVFQTRNPLTLVISGSGHCALEAALVNVLEPGDSFLVGANGIWGQRAVDIGERIGARVHPMTKDPGGHYTLQEVEEGLAQHKPVLLFLTHGESSTGVLQPLDGFGELCHRYKCLLLVDSVASLGGTPLYMDRQGIDILYSGSQKALNAPPGTSLISFSDKAKKKMYSRKTKPFSFYLDIKWLANFWGCDDQPRMYHHTIPVISLYSLRESLALIAEQGLENSWRQHREAAAYLHGRLQALGLQLFVKDPALRLPTVTTVAVPAGYDWRDIVSYVIDHFDIEIMGGLGPSTGKVLRIGLLGCNATRENVDRVTEALRAALQHCPKKKL

SEQ ID NO: 92 - protein, 563 aa, Homo sapiens
MLLPAPALRRALLSRPWTGAGLRWKHTSSLKVANEPVLAFTQGSPERDALQKALKDLKGRMEAIPCVVGDEEVWTSDVQYQVSPFNHGHKVAKFCYADKSLLNKAIEAALAARKEWDLKPIADRAQIFLKAADMLSGPRRAEILAKTMVGQGKTVIQAEIDAAAELIDFFRFNAKYAVELEGQQPISVPPSTNSTVYRGLEGFVAAISPFNFTAIGGNLAGAPALMGNVVLWKPSDTAMLASYAVYRILREAGLPPNIIQFVPADGPLFGDTVTSSEHLCGINFTGSVPTFKHLWKQVAQNLDRFHTFPRLAGECGGKNFHFVHRSADVESVVSGTLRSAFEYGGQKCSACSRLYVPHSLWPQIKGRLLEEHSRIKVGDPAEDFGTFFSAVIDAKSFARIKKWLEHARSSPSLTILAGGKCDDSVGYFVEPCIVESKDPQEPIMKEEIFGPVLSVYVYPDDKYKETLQLVDSTTSYGLTGAVFSQDKDVVQEATKVLRNAAGNFYINDKSTGSIVGQQPFGGARASGTNDKPGGPHYILRWTSPQVIKETHKPLGDWSYAYMQ

SEQ ID NO: 93 - protein, 398 aa, Saccharomyces cerevisiae
MKLKLLNMILSMMNKTNNNNNIIINNTLDSLMNKKLLLKNMLLDMNNKKMNNMKRMLNNNNMNPAGANPVVHRIGPAGNINNKLQHLNNMNNWNTQIYNYNKNMEIMNTMNDKLINKLLYKMMTLKLNNMNINKIIMSKTINQHSLNKLNIKFYYYNNDINNNNNNNNNNYYMNMMNKLMNIMNNNMNNNLCNILSYYYKKKVTIEPIKLSYIYLNSDIFSKYISLNDMDKYNNGILTNYQRMLNNIMPKLNDHNISMNYINNINNINNNKYNNMINLLNNNNNINNNNNYNNNNNNYIGNINNIYNNMTIDNIPMDILMYKYLVGWSIKFKGRLSNNNGRTSTTNLLNGTFNNKKYLWSNINNNYKLNYIPSNHNLYNNSNINKNGKYNIKVKLNFI

SEQ ID NO: 94 - protein, 525 aa, Homo sapiens
MAAVVLAATRLLRGSGSWGCSRLRFGPPAYRRFSSGGAYPNIPLSSPLPGVPKPVFATVDGQEKFETKVTTLDNGLRVASQNKFGQFCTVGILINSGSRYEAKYLSGIAHFLEKLAFSSTARFDSKDEILLTLEKHGGICDCQTSRDTTMYAVSADSKGLDTVVALLADVVLQPRLTDEEVEMTRMAVQFELEDLNLRPDPEPLLTEMIHEAAYRENTVGLHRFCPTENVAKINREVLHSYLRNYYTPDRMVLAGVGVEHEHLVDCARKYLLGVQPAWGSAEAVDIDRSVAQYTGGIAKLERDMSNVSLGPTPIPELTHIMVGLESCSFLEEDFIPFAVLNMMMGGGGSFSAGGPGKGMFSRLYLNVLNRHHWMYNATSYHHSYEDTGLLCIHASADPRQVREMVEIITKEFILMGGTVDTVELERAKTQLTSMLMMNLESRPVIFEDVGRQVLATRSRKLPHELCTLIRNVKPEDVKRVASKMLRGKPAVAALGDLTDLPTYEHIQTALSSKDGRLPRTYRLFR

SEQ ID NO: 95 - protein, 411 aa, Homo sapiens
MKAARFVLRSAGSLNGAGLVPREVEHFSRYSPSPLSMKQLLDFGSENACERTSFAFLRQELPVRLANILKEIDILPTQLVNTSSVQLVKSWYIQSLMDLVEFHEKSPDDQKALSDFVDTLIKVRNRHHNVVPTMAQGIIEYKDACTVDPVTNQNLQYFLDRFYMNRISTRMLMNQHILIFSDSQTGNPSHIGSIDPNCDVVAVVQDAFECSRMLCDQYYLSSPELKLTQVNGKFPDQPIHIVYVPSHLHHMLFELFKNAMRATVEHQENQPSLTPIEVIVVLGKEDLTIKISDRGGGVPLRIIDRLFSYTYSTAPTPVMDNSRNAPLAGFGYGLPISRLYAKYFQGDLNLYSLSGYGTDAIIYLKALSSESIEKLPVFNKSAFKHYQMSSEADDWCIPSREPKNLAKEVAM

SEQ ID NO: 96 - protein, 296 aa, Homo sapiens [sequence omitted]

SEQ ID NO: 97 - protein, 430 aa, Mus musculus
MALLHSSRILSGMAAAFHPGLAAAASARASSWWTHVEMGPPDPILGVTEAFKRDTNSKKMNLGVGAYRDDNGKPYVLPSVRKAEAQIAAKNLDKEYLPIGGLAEFCKASAELALGENNEVLKSGRFVTVQTISGTGALRVGASFLQRFFKFSRDVFLPKPSWGNHTPIFRDAGMQLQGYRYYDPKTCGFDFSGALEDISKIPEQSVLLLHACAHNPTGVDPRPEQWKEIASVVKKKNLFAFFDMAYQGFASGDGDKDAWAVRHFIEQGINVCLCQSYAKNMGLYGERVGAFTVVCKDAEEAKRVESQLKILIRPLYSNPPLNGARIAATILTSPDLRKQWLQEVKGMADRIISMRTQLVSNLKKEGSSHNWQHITDQIGMFCFTGLKPEQVERLTKEFSVYMTKDGRISVAGVTSGNVGYLAHAIHQVTK

SEQ ID NO: 98 - protein, 748 aa, Mus musculus
MLRAKNQLFLLSPHYLKQLNIPSASRWKRLLHQQQPLHPEWAVLAKKQLKGKNPEDLIWHTPEGISIKPLYSRADTLDLPEELPGVKPFTRGPYPTMYTYRPWTIRQYAGFSTVEESNKFYKDNIKAGQQGLSVAFDLATHRGYDSDNPRVRGDVGMAGVAIDTVEDTKILFDGIPLEKMSVSMTMNGAVIPVLATFIVTGEEQGVPKEKLTGTIQNDILKEFMVRNTYIFPPEPSMKIIADIFQYTAQHMPKFNPISISGYHMQEAGTDAILELAYTIADGLEYCRTGLQAGLTIDEFAPRLSFFWGIGMNFYMEIAKMRAGRRLWAHLIEKMFQPKNSKSLLLRAHCQTSGWSLTEQDPYNNIVRTAIEAMAAVFGGTQSLHSNSFDEALGLPTVKSARIARNTRIIIQEESGIPKVADPWGGSYMMESLTNDVYEAALKLIYEVEEMGGMAKAVAEGIPKLRIEECAARRQARIDSGSEVIVGVNKYHLEKEDSVHLLAIDIISLRKKQIEKLKKIKSSRDQALAEQCLSALTQCAASGDGNILALAVDAARARCTVPEITDAFKKVFGEHKANDRMVSGAYRQEFGESKEITSAIKRVNKFMEREGRRLGLLVAKMGKDGHDRGAKVIATGFADLGFDVDIGPLFQTPREVAHDAVDADVHAVGVSTHAAGHKTLVPELIKELTALGRPDILVMCGGVIPPQDYEFLYEVGVSNVFGPGTRIPRAAVQVLDDIEKCLAEKQQSV

SEQ ID NO: 99 - protein, 375 aa, Neurospora crassa
MAPLTAAMRRTPRIIVSNAFGFQRRAISDVTITRTGKPIIRNQGGRSSLGGHTATVFGATGQLGRYIVNRLARQGCTVVIPFRDEYNKRHLKVTGDLGKVVMIEFDLRNTQSIEESVRHSDVVYNLIGRDYPTKNFSFEDVHIEGAERIAEAVAKYDVDRFIHVSSYNADPNSECEFFATKARGEQVVRSIFPETTIVRPAPMFGFEDRLLHKLASVKNILTSNGMQEKYNPVHVIDVGQALEQMLWDDNTASETFELYGPKTYTTAEISEMVDREIYKRRRHVNVPKKILKPIAGVLNKALWWPIMSADEIEREFHDQVIDPEAKTFKDLGIEPADIANFTYHYLQSYRSNAYYDLPPATEKERREDREYIHML

SEQ ID NO: 100 - protein, 110 aa, Caenorhabditis elegans
SDIPAGDYEKGKKVYKQRCLQCHVVDSTATKTGPTLHGVIGRTSGTVSGFDYSAANKNKGVVWTKETLFEYLLNPKKYIPGTKMVFAGLKKADERADLIKYIEVESAKSL

SEQ ID NO: 101 - protein, 558 aa, Mus musculus
MYRRLGEALLLSRAGPAALGSAAADSAALLGWARGQPSAAPQPGLTPVARRHYSEAAADREDDPNFFKMVEGFFDRGASIVEDKLVEDLKTRESEEQKRNRVRGILRIIKPCNHVLSLSFPIRRDDGSWEVIEGYRAQHSQHRTPCKGGIRYSTDVSVDEVKALASLMTYKCAVVDVPFGGAKAGVKINPKNYTDNELEKITRRFTMELAKKGFIGPGIDVPAPDMSTGEREMSWIADTYASTIGHYDINAHACVTGKPISQGGIHGRISATGRGVFHGIENFINEASYMSILGMTPGFGDKTFVVQGFGNVGLHSMRYLHRFGAKCVGVGESDGSIWNPDGIDPKELEDFKLQHGSILGFPKAKVYEGSILEADCDILIPAASEKQLTKSNAPRVKAKIIAEGANGPTTPEADKIFLERNIMVIPDLYLNAGGVTVSYFEWLKNLNHVSYGRLTFKYERDSNYHLLMSVQESLERKFGKHGGTIPVVPTAEFQDRISGASEKDIVHSGLAYTMERSARQIMRTAMKYNLGLDLRTAAYVNAIEKVFKVYNEAGVTFT

SEQ ID NO: 102 - protein, 390 aa, Mus musculus
MRKMLAAVSRVLAGSAQKPASRVLVASRNFANDATFEIKKCDLHRLEEGPPVTTVLTREDGLKYYRMMQTVRRMELKADQLYKQKIIRGFCHLCDGQEACCVGLEAGINPTDHLITAYRAHGFTFTRGLPVRAILAELTGRRGGCAKGKGGSMHMYAKNFYGGNGIVGAQVPLGAGIALACKYNGKDEVCLTLYGDGAANQGQIFEAYNMAALWKLPCIFICENNRYGMGTSVERAAASTDYYKRGDFIPGLRVDGMDILCVREATKFAAAYCRSGKGPILMELQTYRYHGHSMSDPGVSYRTREEIQEVRSKSDPIMLLKDRMVNSNLASVEELKEIDVEVRKEIEDAAQFATADPEPPLEELGYHIYSSDPPFEVRGANQWIKFKSVS

SEQ ID NO: 103 - protein, 220 aa, Homo sapiens
PPTPSAPCPATPAGPKGRVFVSPLAKKLAVEKGIDLTQVKGTGPDGRITKKDIDSFVPSKVAPAPAAVVPPTGPGMAPVPTGVFTDIPISNIRRVIAQRLMQSKQTIPHYYLSIDVNMGEVLLVRKELNKILEGRSKISVNDFIIKASALACLKVPEANSSWMDTVIRQNHVVDVSVAVSTPAGLITPIVFNAHIKGVETIANDVVSLATKAREGKLQPH

SEQ ID NO: 104 - protein, 896 aa, Neurospora crassa
MIKFYFTTFHMKFPARLFSTSFTLNNTNIINEKDVKYITKNFLLENSNGFNLIKNIINSDETSEVKQNKIEVELNNIWHTEITDILQKKRSLGLDAIGSSILAKDFHNLIGDIENFINKGRTNKLPGVEYLKPSLIISIVLGKVIPFSLRHSDIFNQPTHSLFAEIGKILKYQSIFELHHRIGLIQNRVEEIKNYTEKKLVSEFNKLTKVLDEYKNTLKNLEELSGESIIKVGLGFTALLSETSEFYSLEEQIIAKNKSIRYIIPKNKLKTLINNITLMDTIELPMIIPPLEWKIDDNEKIIEYGGTILNNKHRIRPLRTKSVENSDANDMTYNKELVDAVNFKSKIPYTINLKILDFITRDEFINRDKKDNVIIYKHIHPDSALLGEYMKDRKNPKISEITTHNSKFLYHSSIISIAKLMKDVKEFYMTVFIDWRGRFYTSSCALNIQGGELARSLLLFKEGQKLNDIGLKALKIYTANAFGLDKRSKEERLDWVEQNLHKIIDIDNYEIWREADEPLLFLACALELKGYNEDPNFISHLPILMDATCNGLQHLSAMVNDFVLAEKVNLLKSTENDNPRDLYSEVIPHIKQEILEASKSYEHTNLERINVERCLVKRGLMTITYGATERGIYDQIVSKFFQKDEWNKTVGLHFVCIDSDIAPKDVVFTQKNILLLSKIIYNSLFKIHPNLNTLMVYFNSIVKVLCELDLPVNWVTPYGLVIQQKYNKFTKYNETTYVASKRYKLVLRKADTTSISKQKQIQAFIPNFVHSMDGSNIVLLINTIRDEGRKINFASIHDCFATHANDTAWLSWYVKQSFIRIYSDSSFLRRFHNYIQLRIQAKYGEDAHFDKDGVLTHVTIDNGTDIPDRIDIPKPLVVNKDNKIYKEILHSEYFIN

SEQ ID NO: 105 - protein, 255 aa, Homo sapiens
MAELRVLVAVKRVIDYAVKIRVKPDRTGVVTDGVKHSMNPFCEIAVEEAVRLKEKKLVKEVIAVSCGPAQCQETIRTALAMGADRGIHVEVPPAEAERLGPLQVARVLAKLAEKEKVDLVLLGKQAIDDDCNQTGQMTAGFLDWPQGTFASQVTLEGDKLKVEREIDGGLETLRLKLPAVVTADLRLNEPRYATLPNIMKAKKKKIEVIKPGDLGVDLTSKLSVISVEDPPQRTAGVKVETTEDLVAKLKEIGRI

SEQ ID NO: 106 - protein, 289 aa, Mus musculus
MALAAARRLLLHAGSRLGRREAVDGARPFANKRVLVETEGPAGVAVMKLRNPPVNSLSLECLTEFTISLEKLENDKSIRGVILTSECPGIFSAGLDLLEMYGRNPAHYAEYWKNVQELWLRLYTSNMILVSAINGASPAGGCLLALCCDYRVMADNPKYTIGLNESLLGIVAPFWFKDMYVNTIGHREADGALQLGTLFSPAEALKVGVVDEVVPEDQVHSKARSVMTKWLAIPDHSRQLTKNMMRKATADNLIKQREADIQNFTSFISKDSIQKSLHMYLEKLKQKKG

SEQ ID NO: 107 - protein, 390 aa, Mus musculus
MAAVAARAGGLLWLRAAGAERRRCGLRCAALVQGFLQPGGEDTAQKRRVAHFTFHPDPESLQYGQTQKMNLFQSITSALDNSLAKDPTAVIFGEDVAFGGVFRCTVGLRDKYGKDRVFNTPLCEQGIVGFGIGIAVTGATAIAEIQFADYIFPAFDQIVNEAAKYRYRSGDLFNCGSLTIRAPWGCVGHGALYHSQSPEAFFAHCPGIKVVIPRSPFQAKGLLLSCIEDKNPCIFFEPKILYRAAVEQVPVEPYKIPLSQAEVIQEGSDVTLVAWGTQVHVIREVASMAQEKLGVSCEVIDLRTIVPWDVDTVCKSVIKTGRLLISHEAPLTGGFASEISSTVQEECFLNLEAPISRVCGYDTPFPHIFEPFYIPDKWKCYDALRKMINY

SEQ ID NO: 108 - protein, 742 aa, Homo sapiens
MLRAKNQLFLLSPHYLRQVKESSGSRLIQQRLLHQQQPLHPEWAALAKKQLKGKNPEDLIWHTPEGISIKPLYSKRDTMDLPEELPGVKPFTRGPYPTMYTFRPWTIRQYAGFSTVEESNKFYKDNIKAGQQGLSVAFDLATHRGYDSDNPRVRGDVGMAGVAIDTVEDTKILFDGIPLEKMSVSMTMNGAVIPVLANFIVTGEEQGVPKEKLTGTIQNDILKEFMVRNTYIFPPDPSMKIIADIFEYTAKHMPKFNSISISGYHMQEAGADAILELAYTLADGLEYSRTGLQAGLTIDEFAPRLSFFWGIGMNFHMEIAKMRAGRRLWAHLIEKMFQPKNSKSLLLRAHCQTSGWSLTEQDPYNNIVRTAIEAMAAVFGGTQSLHTNSFDEALGLPTVKSARIARNTQIIIQEESGIPKVADPWGGSYMMECLTKLINEIEEMGGMAKAVAEGIPKLRIEECAARRQARIDSGSEVIVGVNKYQLEKEDAVEVLATDNTSVRNRQIEGLKKIKSSRDQALAEHCLAALTECAASGDGNILALAVDASRARCTVGEITDALKKVFGEHKANDRMVSGAYRQEYGESKEITSAIKRVHKFMEREGRRPRLLVAKMGQDGHDRGAKVIATGFADLGFDVDIGPLFQTPREVAQQAVDADVHAVGVSTLAAGHKTLVPELIKELNSLGRPDILVMCGGVIPPQDYEFLFEVGVSNVFGPGTRIPKAAVQVLDDIEKCLEKKQQSV

SEQ ID NO: 109 - protein, 288 aa, Caenorhabditis elegans
MMRFSSMLVRNAKLCANVNQMQVAAFSSKAPEMIKIEKVGEKQNVALIKLNRPKALNALCAQLMTELADALEVLDTDKSVGAIVITGSERAFAAGADIKEMTNNEFATTFSGSFLSNWTAVSDVKKPVIAAVNGFALGGGNELAMMCDIIYAGEKARFGQPEINIGTIPGAGGTQRWARAAGKSFAMEVCLTGNHVTAQEAKEHGIVSKIFPADQVVGEAVKLGEKIADQSPLIVQMAKEAVNKAYELTLQEGLHFERRLFHATFATKDRKEGMTAFAEKRKPQWESK

SEQ ID NO: 110 - protein, 469 aa, Neurospora crassa
MAPVMRLGSAALRSSIHLTSRQTAFTAARCYSSKTQTLKERFAELLPENIEKIKALRKEHGSKVVDKVTLDQVYGGARGIKCLVWEGSVLDAEEGIRFRGKTIPECQELLPKAPGGKEPLPEGLFWLLLTGEVPSEQQVRDLSAEWAARSDVPKFIEELIDRCPSDLHPMAQLSLAVTALEHTSSFARAYAKGINKKEYWGYTFEDSMDLIAKLPTIAARIYQNVFKGGKVAAVQKDKDYSFNFANQLGFGDNKDFVELLRLYLTIHTDHEGGNVSAHTTHLVGSALSSPFLSVAAGLNGLAGPLHGLANQEVLNWLTEMKKVIGDDLSDEAITKYLWDTLNAGRVVPGYAHAVLRKTDPRYSAQRKFAQEHLPEDPMFQLVSQVYKIAPKVLTEHGKTKNPYPNVDAHSGVLLQHYGLTEANYYTVLFGVSRAIGVLPQLIIDRAVGAPIERPKSYSTDKWIEICKKL

SEQ ID NO: 111 - protein, 937 aa, Homo sapiens
MLAAAGGRVPTAAGAWLLRGQRTCDASPPWALWGRGPAIGGQWRGFWEASSRGGGAFSGGEDASEGGAEEGAGGAGGSAGAGEGPVITALTPMTIPDVFPHLPLIAITRNPVFPRFIKIIEVKNKKLVELLRRKVRLAQPYVGVFLKRDDSNESDVVESLDEIYHTGTFAQIHEMQDLGDKLRMIVMGHRRVHISRQLEVEPEEPEAENKHKPRRKSKRGKKEAEDELSARHPAELAMEPTPELPAEVLMVEVENVVHEDFQVTEEVKALTAEIVKTIRDIIALNPLYRESVLQMMQAGQRVVDNPIYLSDMGAALTGAESHELQDVLEETNIPKRLYKALSLLKKEFELSKLQQRLGREVEEKIKQTHRKYLLQEQLKIIKKELGLEKDDKDAIEEKFRERLKELVVPKHVMDVVDEELSKLGLLDNHSSEFNVTRNYLDWLTSIPWGKYSNENLDLARAQAVLEEDHYGMEDVKKRILEFIAVSQLRGSTQGKILCFYGPPGVGKTSIARSIARALNREYFRFSVGGMTDVAEIKGHRRTYVGAMPGKIIQCLKKTKTENPLILIDEVDKIGRGYQGDPSSALLELLDPEQNANFLDHYLDVPVDLSKVLFICTANVTDTIPEPLRDRMEMINVSGYVAQEKLAIAERYLVPQARALCGLDESKAKLSSDVLTLLIKQYCRESGVRNLQKQVEKVLRKSAYKIVSGEAESVEVTPENLQDFVGKPVFTVERMYDVTPPGVVMGLAWTAMGGSTLFVETSLRRPQDKDAKGDKDGSLEVTGQLGEVMKESARIAYTFARAFLMQHAPANDYLVTSHIHLHVPEGATPKDGPSAGCTIVTALLSLAMGRPVRQNLAMTGEVSLTGKILPVGGIKEKTIAAKRAGVTCIILPAENKKDFYDLAAFITEGLEVHFVEHYREIFDIAFPDEQAEALAVER

SEQ ID NO: 112 - protein, 468 aa, Caenorhabditis elegans
MSLSGMAIRRLITKGVIPVCQVAPLSTSAEGSTNLKEVLSKKIPAHNAKVKSFRTEHGSTVVQNVNIDMIYGGMRSMKGMVTETSVLDPEEGIRFRGYSIPECQKLLPKAKGGEEPLPEAIWWLLCTGDVPSEAQTAAITKEWNARADLPTHVVRMLDNFPDNLHPMAQFIAAIAALNNESKFAGAYARGVAKASYWEYAYEDSMDLLAKLPTVAAIIYRNLYRDGSAVSVIDPKKDWSANFSSMLGYDDPLFAELMRLYLVIHSDHEGGNVSAHTSHLVGSALSDPYLSFSAAMAGLAGPLHGLANQEVLVFLNKIVGEIGFNYTEEQLKEWVWKHLKSGQVVPGYGHAVLRKTDPRYECQREFALKHLPNDDLFKLVSTLYKITPGILLEQGKAKNPWPNVDSHSGVLLQYFGMTEMSFYTVLFGVSRALGCLSQLIWARGMGLPLERPKSHSTDGLIKLALAAKK

SEQ ID NO: 113 - protein, 102 aa, Homo sapiens
MAGQAFRKFLPLFDRVLVERSAAETVTKGGIMLPEKSQGKVLQATVVAVGSGSKGKGGEIQPVSVKVGDKVLLPEYGGTKVVLDDKDYFLFRDGDILGKYVD

SEQ ID NO: 114 - protein, 604 aa, Homo sapiens
MGAALGTGTRLAPWPGRACGALPRWTPTAPAQGCHSKPGPARPVPLKKRGYDVTRNPHLNKGMAFTLEERLQLGIHGLIPPCFLSQDVQLLRIMRYYERQQSDLDKYIILMTLQDRNEKLFYRVLTSDVEKFMPIVYTPTVGLACQHYGLTFRRPRGLFITIHDKGHLATMLNSWPEDNIKAVVVTDGERILGLGDLGCYGMGIPVGKLALYTACGGVNPQQCLPVLLDVGTNNEELLRDPLYIGLKHQRVHGKAYDDLLDEFMQAVTDKFGINCLIQFEDFANANAFRLLNKYRNKYCMFNDDIQGTASVAVAGILAALRITNNKLSNHVFVFQGAGEAAMGIAHLLVMALEKEGVPKAEATRKIWMVDSKGLIVKGRSHLNHEKEMFAQDHPEVNSLEEVVRLVKPTAIIGVAAIAGAFTEQILRDMASFHERPIIFALSNPTSKAECTAEKCYRVTEGRGIFASGSPFKSVTLEDGKTFIPGQGNNAYVFPGVALGVIAGGIRHIPDEIFLLTAEQIAQEVSEQHLSQGRLYPPLSTIRDVSLRIAIKVLDYAYKHNLASYYPEPKDKEAFVRSLVYTPDYDSFTLDSYTWPKEAMNVQTV

SEQ ID NO: 115 - protein, 494 aa, Mus musculus
MAPRCWHWWRWSAWSGLRPSPSRSTPTPGFCQKFSTQEKTPQICVVGSGPAGFYTAQHLLKHHTHAHVDIYEKQLVPFGLVRFGVAPDHPEVKNVINTFTQTARSDRCAFQGNVVVGRDVSVPELREAYHAVVLSYGAEDHQPLGIPGEELPGVVSARAFVGWYNGLPENQELAPDLSCDTAVILGQGNVALDVARILLTPPEHLEKTDITEAALGALRQSRVKTVWIVGRRGPLQVAFTIKELREMIQLPGTRPILDPSDFLGLQDRIKDVPRPRRRLTELLLRTATEKPGVEEAARQALASRAWGLRFFRSPQQVLPTPDGQRVAGIRLAVTSLEGVGESTRAVPTGDVEDLPCGLLLSSVGYKSRPIDPSVPFDPKLGVIPNTEGRVVNVPGLYCSGWVKRGPTGVITTTMTDSFLTSQALLEDLKAGLLPSGPRPGYVAIQALLSNRGVRPVSFSDWEKLDAEEVSRGQGTGKPREKLVDRREMLRLLGH

SEQ ID NO: 116 - protein, 482 aa, Mus musculus
MAAARVLRTWSQNAVRLTCVRYFQTFNSARVLKPKCVCSVGYPLFKYSQPRHSLRTAAVLQGQVVQFKLSDIGEGIREVTIKEWYVKEGDTVSQFDSICEVQSDKASVTITSRYDGVIKRLYYNLDDIAYVGKPLIDIETEALKDSEEDVVETPAVSHDEHTHQEIKGQKTLATPAVRRLAMENNIKLSEVVGSGKDGRILKEDILSFLEKQTGAILPPSPKSEITPPPPQPKDRTFPTPIAKPPVFTGKDRTEPVTGFQKAMVKTMSAALKIPHFGYCDEIDLTQLVKLREELKPVALARGIKLSFMPFFLKAASLGLLQFPILNASVDENCQNITYKASHNIGIAMDTELGLIVPNVKNVQVRSVFGIGMELNRLQKLGSSGQLGTTDLTGGTFTLSNIGSIGGTYAKPVILPPEVAIGALGAIKALPRFDQKGDVYKAQIMNVSWSADHRVIDGATMSRFSNLWKSYLENPAFMLLDLK

SEQ ID NO: 117 - protein, 442 aa, Mus musculus
MSAAKIWRPSRGLRQAALLLLGRSGVRGLARSHPSRQQQQQFPSLDDKPQFPGASAEFVDKLEFIQPNVISGIPIYRVMDRQGQIINPSEDPHLPQEEVLKFYRSMTLLNTMDRILYESQRQGRISFYMTNYGEEGTHVGSAAALERTDLVFGQYREAGVLMYRDYPLELFMSQCYGNVNDPGKGRQMPVHYGCKERHFVTISSPLATQIPQAVGAAYAAKRANANRIVICYFGEGAASEGDAHAGFNFAATLECPIIFFCRNNGYAISTPTSEQYRGDGIAARGPGYGIKSIRVDGNDVFAVYNATKEARRRAVAENQPFLIEAMTYRIGHHSTSDDSSAYRSVDEVNYWDKQDHPISRLRQYLLNQGWWDEEQEKAWRKQSRKKVMEAFEQAERKLKPNPSLLFSDVYQEMPAQLRRQQESLARHLQTYGEHYPLDHFEK

SEQ ID NO: 118 - protein, 520 aa, Homo sapiens
MAALKLLSSGLRLCASARGSGATWYKGCVCSFSTSAHRHTKFYTDPVEAVKDIPDGATVLVGGFGLCGIPENLIDALLKTGVKGLTAVSNNAGVDNFGLGLLLRSKQIKRMVSSYVGENAEFERQYLSGELEVELTPQGTLAERIRAGGAGVPAFYTPTGYGTLVQEGGSPIKYNKDGSVAIASKPREVREFNGQHFILEEAITGDFALVKAWKADRAGNVIFRKSARNFNLPMCKAAETTVVEVEEIVDIGAFAPEDIHIPQIYVHRLIKGEKYEKRIERLSIRKEGDGEAKSAKPGDDVRERIIKRAALEFEDGMYANLGIGIPLLASNFISPNITVHLQSENGVLGLGPYPRQHEADADLINAGKETVTILPGASFFSSDESFAMIRGGHVDLTMLGAMQVSKYGDLANWMIPGKMVKGMGGAMDLVSSAKTKVVVTMEHSAKGNAHKIMEKCTLPLTGKQCVNRIITEKAVFDVDKKKGLTLIELWEGLTVDDVQKSTGCDFAVSPKLMPMQQIAN

SEQ ID NO: 119 - protein, 221 aa, Caenorhabditis elegans
MLQNTVRCVSKLVQPITGVAAVRSKHSLPDLPYDYADLEPVISHEIMQLHHQKHHATYVNNLNQIEEKLHEAVSKGNVKEAIALQPALKFNGGGHINHSIFWTNLAKDGGEPSAELLTAIKSDFGSLDNLQKQLSASTVAVQGSGWGWLGYCPKGKILKVATCANQDPLEATTGLVPLFGIDVWEHAYYLQYKNVRPDYVNAIWKIANWKNVSERFAKAQQ

SEQ ID NO: 120 - protein, 218 aa, Caenorhabditis elegans
MLQSTARTASKLVQPVAGVLAVRSKHTLPDLPFDYADLEPVISHEIMQLHHQKHHATYVNNLNQIEEKLHEAVSKGNLKEAIALQPALKFNGGGHINHSIFWTNLAKDGGEPSKELMDTIKRDFGSLDNLQKRLSDITIAVQGSGWGWLGYCKKDKILKIATCANQDPLEGMVPLFGIDVWEHAYYLQYKNVRPDYVHAIWKIANWKNISERFANARQ

SEQ ID NO: 121 - protein, 587 aa, Homo sapiens
MVTAAMLLQCCPVLARGPTSLLGKVVKTHQFLFGIGRCPILATQGPNCSQIHLKATKAGGDSPSWAKGHCPFMLSELQDGKSKIVQKAAPEVQEDVKAFKTDLPSSLVSVSLRKPFSGPQEQEQISGKVTHLIQNNMPGNYVFSYDQFFRDKIMEKKQDHTYRVFKTVNRWADAYPFAQHFSEASVASKDVSVWCSNDYLGMSRHPQVLQATQETLQRHGAGAGGTRNISGTSKFHVELEQELAELHQKDSALLFSSCFVANDSTLFTLAKILPGCEIYSDAGNHASMIQGIRNSGAAKFVFRHNDPDHLKKLLEKSNPKIPKIVAFETVHSMDGAICPLEELCDVSHQYGALTFVDEVHAVGLYGSRGAGIGERDGIMHKIDIISGTLGKAFGCVGGYIASTRDLVDMVRSYAAGFIFTTSLPPMVLSGALESVRLLKGEEGQALRRAHQRNVKHMRQLLMDRGLPVIPCPSHIIPIRVGNAALNSKLCDLLLSKHGIYVQAINYPTVPRGEELLRLAPSPHHSPQMMEDFVEKLLLAWTAVGLPLQDVSVAACNFCRRPVHFELMSEWERSYFGNMGPQYVTTYA

SEQ ID NO: 122 - protein, 640 aa, Homo sapiens
MESVVRRCPFLSRVPQAFLQKAGKSLLFYAQNCPKMMEVGAKPAPRALSTAAVHYQQIKETPPASEKDKTAKAKVQQTPDGSQQSPDGTQLPSGHPLPATSQGTASKCPFLAAQMNQRGSSVFCKASLELQEDVQEMNAVRKEVAETSAGPSVVSVKTDGGDPSGLLKNFQDIMQKQRPERVSHLLQDNLPKSVSTFQYDRFFEKKIDEKKNDHTYRVFKTVNRRAHIFPMADDYSDSLITKKQVSVWCSNDYLGMSRHPRVCGAVMDTLKQHGAGAGGTRNISGTSKFHVDLERELADLHGKDAALLFSSCFVANDSTLFTLAKMMPGCEIYSDSGNHASMIQGIRNSRVPKYIFRHNDVSHLRELLQRSDPSVPKIVAFETVHSMDGAVCPLEELCDVAHEFGAITFVDEVHAVGLYGARGGGIGDRDGVMPKMDIISGTLGKAFGCVGGYIASTSSLIDTVRSYAAGFIFTTSLPPMLLAGALESVRILKSAEGRVLRRQHQRNVKLMRQMLMDAGLPVVHCPSHIIPVRVADAAKNTEVCDELMSRHNIYVQAINYPTVPRGEELLRIAPTPHHTPQMMNYFLENLLVTWKQVGLELKPHSSAECNFCRRPLHFEVMSEREKSYFSGLSKLVSAQA

SEQ ID NO: 123 - protein, 903 aa, Homo sapiens; identical to SEQ ID NO: 50

SEQ ID NO: 124 - protein, 586 aa, Mus musculus
WFVLSAGQQDFGLRMVAAAMLLRSCPVLSQGPTGLLGKVAKTYQFLFSIGRCPILATQGPTCSQIHLKATKAGGELQDRKSKIVQRAAPEVQEDVKTFKTDLLSTMDSTTRSHSFPSFQEPEQTEGAVPHLIQNNMTGSQAFGYDQFFRDKIMEKKQDHTYRVFKTVNRWANAYPFAQHFSEASMASKDVSVWCSNDYLGISRHPRVLQAIEETLKNHGAGAGGTRNISGTSKFHVELEQELAELHQKDSALLFSSCFVANDSTLFTLAKLLPGCEIYSDAGNHASMIQGIRNSGAAKFVFRHNDPGHLKKLLEKSDPKTPKIVAFETVHSMDGAICPLEELCDVAHQYGALTFVDEVHAVGLYGARGAGIGERDGIMHKLDIISGTLGKAFGCVGGYIASTRDLVDMVRSYAAGFIFTTSLPPMMLSGALESVRLLKGEEGQALRRAHQRNVKHMRQLLMDRGFPVIPCPSHIIPIRVGNAALNSKICDLLLSKHSIYVQAINYPTVPRGEELLRLAPSPHHSPQMMENFVEKLLLAWTEVGLPLQDVSVAACNFCHRPVHFELMSEWERSYFGNMGPQYVTTYA

SEQ ID NO: 125 - protein, 994 aa, Neurospora crassa
MPLICARPLGRLVPKLGASLRPVLSSHAASPRRPVGVALEQHLGTESWKRFYADHKLDLLALDQKWRQKWAESSREKGNKEDEKNKYVLPMFPYPSGHLHLGHLRVYTIADVIARFQTLQGHKVLLPMGWDAFGLPAENAAIERGINPATWTKANIAKMKEQLGHMNGSWDWNCELATCDPDFYKHTQKIFLALHEKGLAYQAEAEVNYDPVDKTVLANEQVDANGCSWRSGARVEKRKLKQWFLKISEFRESLLKDLETLAKNEAWPERVLAMQKNWLGKSKGATVKFPVLAFGQGTPSAIEVFTSRPDTLFGVQYIALAATHPSVQQLAKSDPELQAFLSTLPGLSPDSKVGYLLPHIRAVNPLAYHEETPEDTKVSLPIYVAPYVLGDYGEGAVMGVPGHDLRDHAFWKEHHYDAPVRFVLAASEDESTTAMPNEPFTEHGVMNANSGIFKGKSSKEAGEMLVKLLEPAGLAKETEKWRLRDWLISRQRYWGTPIPIVHCGSCGTVPVPDEQLPVELPEVDEHWAGKKTGNPLESQTDWINTSCPKCGGEAKRDTDTMDTFVDSSWYYMRFIDAHNKEAPFSPEKAKVLTPVDLYIGGVEHAILHLLYSRFIYKFLMTSSFAGKEAESAEAAESASSEVYEPFKRLITQGMVHGKTYTDPATGRFLKPDEVDLSDPHQPKVVATGALANVSYEKMSKSKHNGVDPTTFIAQYGADATRAHILFQAPVSEILDWDESKITGVTRWLSRVHDLVQKIACSSTSETPSSASTVKAFFEQQQQQPESVADPAKLDASITIWREVQRTISSVTASYNKVYTLNTVISDLMSLTNVIASPSNYDAADPLIRREAVSALIRMMAPVAPAFAEECWHVLFPESSSSSLFSGSGSGSGSGSGDEQAARFPVPDGTEGLLKSRKQTCAVQLNGKTKFAVEIGTPPAGLLEKSAEEKLREFIVGEVLKTEEGRAKLEGRGVDVSKAKKVIVVRGGKLLNVVM

SEQ ID NO: 126 - protein, 531 aa, Neurospora crassa
MLLRTKALIRSGGSIAKYAAANPSCFILQRRGLRREFGPKYTAKINEAEENWQARAEAIKKGKKQNTWDLFEERGYVKDTAGTKEHIAELMRTRRIGAYVGIDPTAPSLHVGHLLPLMPLFWMYLEGYKAFTLIGGSTAKIGDPTGRLKSRDHLSSSDATMNMTKIHYQLKKLWENVDTQMRARGYEADWARKRGIVNNNHWWNKQPMLEVLRRVGHALRIGPMLSRDTVKNKMTQGDGVSFAEFTYPIMQGWDWFELFYQQGVQMQIGGSDQYGNIISGLEVVKAARESEPDPQERKYVTPKTALDECVGFTVPLLTDSSGAKFGKSAGNAIWLDPYQTSVFDFYGYFVRRSDQEVENLLKLFTFMPISEITKTMEEHIKDPSKRVAQHTLAREVVTLVHGKQEASAAEDQHRMMYTGQMTIPQVSRAKDAATGGDQYKTISDQPVTLNNAPRIDMILPESLIMGKSIGRILSPPVLPAAPPRATSSRLPRAATSADAQSRRRERHHEPGPHLFYARQAVVPRRDPALPD

SEQ ID NO: 127 - protein, 350 aa, Caenorhabditis elegans
MRNYDFQPNNLRLLSTSTHPTIYFTGFQPTGTPHLGNFFGSIEPWTELQNSVDKNILMMLSVVDQHAISLGPLPANELRQNTHGMTASLIACGVDPNRTLLFRQSDVPQIAQFSWFLGSLQTTSKLARLPQYKEKKERFKKGDIPVGLLTYPLLQAADVLTFKATTVPVGEDQSQHLNLLGGLAYAFNKTYETEIFPIPKQLTRESHARIRSLRGPEKKMSKSSGGPRSRIEITDSRSTIIEKCQLAQSDNAGKVTYDKENRLAVSNLLDLYSAVTKTQTSEIDFSNWTTLDLKMNLAEAVDKRLAPIRQKFEELQNTGEVDKVLTENGEKAREIAEKNLEEIRRTIGFL

SEQ ID NO: 128 - protein, 297 aa, Mus musculus
MVHQVLYRALVSTKWLAESIRSGRLGPSLRVLDASWYSPGTRQARKEYQERHVPGASFFDIEECRDTTSPYEMMLPSEAHFGDYVGNLGISNDTHVVVYDGDDLGSFYAPRVWWMFRVFGHRTVSVLNGGFRNWLKEGHPVTSEPSRPEPAVFKATLNLSLLKTYEQVLENLQSKRFQLVDSRAQGRYLGTQPEPDIVGLDSGHIRGSVNMPFMDFLTKDGFEKSPEELRAIFQDKKVDLSQPLIATCRKGVTACHVALAAYLCGKPDVAVYDGSWSEWFRRAPPETRVSQGKSGKA

SEQ ID NO: 129 - protein, 713 aa, Homo sapiens
MLCVGRLGGLGARAAALPPRRAGRGSLEAGIRARRVSTSWSPVGAAFNVKPQGSRLDLFGERRRLFGVPELSAPEGFHIAQEKALRKTELLVDRACSTPPGPQTVLIFDELSDSLCRVADLADFVKIAHPEPAFREAAEEACRSIGTMVEKLNTNVDLYQSLQKLLADKKLVDSLDPETRRVAELFMFDFEISGIHLDKEKRKRAVDLNVKILDLSSTFLMGTNFPNKIEKHLLPEHIRRNFTSAGDHIIIDGLHAESPDDLVREAAYKIFLYPNAGQLKCLEELLSSRDLLAKLVGYSTFSHRALQGTIAKNPETVMQFLEKLSDKLSERTLKDFEMIRGMKMKLNAQNSEVMPWDPPYYSGVIRAERYNIEPSLYCPFFSLGACMEGLNILLNRLLGISLYAEQPAKGEVWSEDVRKLAVVHESEGLLGYIYCDFFQRADKPHQDCHFTIRGGRLKEDGDYQLPVVVLMLNLPRSSRSSPTLLTPGMMENLFHEMGHAMHSMLGRTRYQHVTGTRCPTDFAEVPSILMEYFANDYRVVNQFARHYQTGQPLPKNMVSRLCESKKVCAAADMQLQVFYATLDQIYHGKHPLRNSTTDILKETQEKFYGLPYVPNTAWQLRFSHLVGYGARYYSYLMSRAVASMVWKECFLQDPFNRAAGERYRREMLAHGGGREPMLMVEGMLQKCPSVDDFVSALVSDLDLDFETFLMDSE

SEQ ID NO: 130 - protein, 501 aa, Homo sapiens
MAASWRLGCDPRLLRYLVGFPGRRSVGLVKGALGWSVSRGRNWRWFHSTQWLRGDPIKILMPSLSPTMEEGNIVKWLKKEGEAVSAGDALCEIETDKAVVTLDASDDGILAKIVVEEGSKNIRLGSLIGLIVEEGEDWKHVEIPKDVGPPPPVSKPSEPRPSPEPQISIPVKKEHIPGTLRFRLSPAARNILEKHSLDASQGTATGPRGIFTKEDALKLVQLKQTGKITESRPTPAPTATPTAPSPLQATAGPSYPRPVIPPVSTPGQPNAVGTFTEIPASNIRRVIAKRLTESKSTVPHAYATADCDLGAVLKVRQDLVKDDIKVSVNDFIIKAAAVTLKQMPDVNVSWDGEGPKQLPFIDISVAVATDKGLLTPIIKDAAAKGIQEIADSVKALSKKARDGKLLPEEYQGGSFSISNLGMFGIDEFTAVINPPQACILAVGRFRPVLKLTEDEEGNAKLQQRQLITVTMSSDSRVVDDELATRFLKSFKANLENPIRLA

SEQ ID NO: 131 - protein, 430 aa, Homo sapiens
MALLHSGRVLPGIAAAFHPGLAAAASARASSWWTHVEMGPPDPILGVTEAFKRDTNSKKMNLGVGAYRDDNGKPYVLPSVRKAEAQIAAKNLDKEYLPIGGLAEFCKASAELALGENSEVLKSGRFVTVQTISGTGALRIGASFLQRFFKFSRDVFLPKPTWGNHTPIFRDAGMQLQGYRYYDPKTCGFDFTGAVEDISKIPEQSVLLLHACAHNPTGVDPRPEQWKEIATVVKKRNLFAFFDMAYQGFASGDGDKDAWAVRHFIEQGINVCLCQSYAKNMGLYGERVGAFTMVCKDADEAKRVESQLKILIRPMYSNPPLNGARIAAAILNTPDLRKQWLQEVKGMADRIIGMRTQLVSNLKKEGSTHNWQHITDQIGMFCFTGLKPEQVERLIKEFSIYMTKDGRISVAGVTSSNVGYLAHAIHQVTK

SEQ ID NO: 132 - protein, 439 aa, Homo sapiens
MFSKLAHLQRFAVLSRGVHSSVASATSVATKKTVQGPPTSDDIFEREYKYGAHNYHPLPVALERGKGIYLWDVEGRKYFDFLSSYSAVNQGHCHPKIVNALKSQVDKLTLTSRAFYNNVLGEYEEYITKLFNYHKVLPMNTGVEAGETACKLARKWGYTVKGIQKYKAKIVFAAGNFWGRTLSAISSSTDPTSYDGFGPFMPGFDIIPYNDLPALERALQDPNVAAFMVEPIQGEAGVVVPDPGYLMGVRELCTRHQVLFIADEIQTGLARTGRWLAVDYENVRPDIVLLGKALSGGLYPVSAVLCDDDIMLTIKPGEHGSTYGGNPLGCRVAIAALEVLEEENLAENADKLGIILRNELMKLPSDVVTAVRGKGLLNAIVIKETKDWDAWKVCLRLRDNGLLAKPTHGDIIRFAPPLVIKEDELRESIEIINKTILSF

SEQ ID NO: 133 - protein, 392 aa, Homo sapiens; identical to SEQ ID NO: 91

SEQ ID NO: 134 - protein, 439 aa, Mus musculus
MLSKLASLQTIAALRRGVHTSVASATSVATKKTEQGPPSSEYIFERESKYGAHNYHPLPVALERGKGIYMWDVEGRQYFDFLSAYGAVSQGHCHPKIIDAMKSQVDKLTLTSRAFYNNVLGEYEEYITKLFNYNKVLPMNTGVEAGETACKLARRWGYTVKGIQKYKAKIVFADGNFWGRTLSAISSSTDPTSYDGFGPFMPGFETIPYNDLPALERALQDPNVAAFMVEPIQGEAGVIVPDPGYLTGVRELCTRHQVLFIADEIQTGLARTGRWLAVDHENVRPDMVLLGKALSGGLYPVSAVLCDDEIMLTIKPGEHGSTYGGNPLGCRIAIAALEVLEEENLAENADKMGAILRKELMKLPSDVVTSVRGKGLLNAIVIRETKDCDAWKVCLRLRDNGLLAKPTHGDIIRLAPPLVIKEDEIRESVEIINKTILSF

SEQ ID NO: 135 - protein, 615 aa, Homo sapiens
RVTSRSGPAPARRNSVTTGYGGVRALCGWTPSSGATPRNRLLLQLLGSPGRRYYSLPPHQKVPLPSLSPTMQAGTIARWKKKEGDKINEGDLIAEVETDKATVGFESLEECYMAKILVAEGTRDVPIGAIICITVGKPEDIEAFKNYTLDSSAAPTPQAAPAPTPAATASPPTPSAQAPGSSYPPHMQVLLPALSPTMTMGTVQRWEKKVGEKLSEGDLLAEIETDKATIGFEVQEEGYLAKILVPEGTRDVPLGTPLCIIVEKEADISAFADYRPTEVTDLKPQVPPPTPPPVAAVPPTPQPLAPTPSAPCPATPAGPKGRVFVSPLAKKLAVEKGIDLTQVKGTGPDGRITKKDIDSFVPSKVAPAPAAVVPPTGPGMAPVPTGVFTDIPISNIRRVIAQRLMQSKQTIPHYYLSIDVNMGEVLLVRKELNKILEGRSKISVNDFIIKASALACLKVPEANSSWMDTVIRQNHVVDVSVAVSTPAGLITPIVFNAHIKGVETIANDVVSLATKAREGKLQPHEFQGGTFTISNLGMFGIKNFSAIINPPQACILAIGASEDKLVPADNEKGFDVASMMSVTLSCDHRVVDGAVGAQWLAEFRKYLEKPITMLL

SEQ ID NO: 136 - protein, 177 aa, Saccharomyces cerevisiae
MKHTTSTMLRTTRLWTTRMPAVSKLFLRNSSGNALNKNKLPFLYSSQGPQAVRYTSQHEWIAVHQDKTAFVGITKYATDSLGDATYVELPEVGTEISQGESLGSIESVKSASEIYQPADGTVEEINTNLEENPGVVNEDPMGDGWLVKMKLGEGVNVEQVEGLMSLEQYEKTLVHDD

SEQ ID NO: 137 - protein, 1133 aa, Saccharomyces cerevisiae
MLRTRTTKTLSTVARTTRAIQYYRSIAKTAAVSQRRFASTLTVRDVENIKPSHIIKSPTWQEFQHQLKDPRYMEHFAQLDAQFARHFMATNSGKSILAKDDSTSQKKDEDVKIVPDEKDTDNDVEPTRDDEIVNKDQEGEASKNSRSSASGGGQSSSSRSDSGDGSSKQKPPKDVPEVYPQMLALPIARRPLFPGFYKAVVISDERVMKAIKEMLDRQQPYIGAFMLKNSEEDTDVITDKNDVYDVGVLAQITSAFPSKDEKTGTETMTALLYPHRRIKIDELFPPNEEKEKSKEQAKDTDTETTVVEDANNPEDQESTSPATPKLEDIVVERIPDSELQHHKRVEATEEESEELDDIQEGEDINPTEFLKNYNVSLVNVLNLEDEPFDRKSPVINALTSEILKVFKEISQLNTMFREQIATFSASIQSATTNIFEEPARLADFAAAVSAGEEDELQDILSSLNIEHRLEKSLLVLKKELMNAELQNKISKDVETKIQKRQREYYLMEQLKGIKRELGIDDGRDKLIDTYKERIKSLKLPDSVQKIFDDEITKLSTLETSMSEFGVIRNYLDWLTSIPWGKHSKEQYSIPRAKKILDEDHYGMVDVKDRILEFIAVGKLLGKVDGKIICFVGPPGVGKTSIGKSIARALNRKFFRFSVGGMTDVAEIKGHRRTYIGALPGRVVQALKKCQTQNPLILIDEIDKIGHGGIHGDPSAALLEVLDPEQNNSFLDNYLDIPIDLSKVLFVCTANSLETIPRPLLDRMEVIELTGYVAEDKVKIAEQYLVPSAKKSAGLENSHVDMTEDAITALMKYYCRESGVRNLKKHIEKIYRKAALQVVKKLSIEDSPTSSADSKPKESVSSEEKAENNAKSSSEKTKDNNSEKTSDDIEALKTSEKINVSISQKNLKDYVGPPVYTTDRLYETTPPGVVMGLAWTNMGGCSLYVESVLEQPLHNCKHPTFERTGQLGDVMKESSRLAYSFAKMYLAQKFPENRFFEKASIHLHCPEGATPKDGPSAGVTMATSFLSLALNKSIDPTVAMTGELTLTGKVLRIGGLREKAVAAKRSGAKTIIFPKDNLNDWEELPDNVKEGLEPLAADWYNDIFQKLFKDVNTKEGNSVWKAEFEILDAKKEKD

SEQ ID NO: 138 - protein, 232 aa, Saccharomyces cerevisiae
MFPYLTRMNLSIKMGGLTLKESSPNAFLNNTTIARRFKHEYAPRFKIVQKKQKGRVPVRTGGSIKGSTLQFGKYGLRLKSEGIRISAQQLKEADNAIMRYVRPLNNGHLWRRLCTNVAVCIKGNETRMGKGKGGFDHWMVRVPTGKILFEINGDDLHEKVAREAFRKAGTKLPGVYEFVSLDSLVRVGLHSFKNPKDDPVKNFYDENAKKPSKKYLNILKSQEPQYKLFRGR

SEQ ID NO: 139 - protein, 541 aa, Saccharomyces cerevisiae
MLRLARFYSLARTKAIHSHGAPFRPEYALKCGLEIHTQLNTKNKLFSQSTNSATSLVDAPNHHTSYYDIALPGTQPVLNLEAILFAMKLSLALGSQVNSISQFDRKHYFYGDQPQGYQLTQHYRPFARGGKINLSKELDDIDESAKEIGILQLQIEQDTGKSHYTETDKDVITLVDLNRSNVPLIELVTKPDFSDIKQVRAFIKKYQNLVRHLHISSGDLETGAMRVDVNLSINEYARVELKNLPNTSSIINAIKYEYQRQVELISVGDTSSLMEPETRGWTGSSTVKLRSKETTIDYRYMPDPELPYINLAPDVISGVRGLMPQLPDDIMRILMKKPYQLSLKDAKILTYNSNQNDMYNHEALRSYYLDTFREFSKLAGERSNAKLPTNWIIHEFLGDLNKLQIPLAKAKEILAPPVFAQFLKLLHEEVISATSGKMLLFHILENFEQSNCQDLSIPDFSKLIEKFELHAINQVDPQELMDLCNDVIAQHTDDTFIRNLVTGKKKSSLKFLIGQGMRRSQGRIKANEFEKKFKEILNIQW

SEQ ID NO: 140 - protein, 177 aa, Saccharomyces cerevisiae
MLKSTLRLSRISLRRGFTTIDCLRQQNSDIDKIILNPIKLAQGSNSDRGQTSKSKTDNADILSMEIPVDMMQSAGRINKRELLSEAEIARSSVENAQMRFNSGKSIIVNKNNPAESFKRLNRIMFENNIPGDKRSQRFYMKPGKVAELKRSQRHRKEFMMGFKRLIEIVKDAKRKGY

SEQ ID NO: 141 - protein, 162 aa, Saccharomyces cerevisiae
MSSSQVVRDSAKKLVNLLEKYPKDRIHHLVSFRDVQIARFRRVAGLPNVDDKGKSIKEKKPSLDEIKSIINRTSGPLGLNKEMLTKIQNKMVDEKFTEESINEQIRALSTIMNNKFRNYYDIGDKLYKPAGNPQYYQRLINAVDGKKKESLFTAMRTVLFGK

SEQ ID NO: 142 - protein, 196 aa, Saccharomyces cerevisiae
MPPERTGTNANEHTFCSLLMLKSIFAKRFASTGSYPGSTRITLPRRPAKKIQLGKSRPAIYHQFNVKMELSDGSVVIRRSQYPKGEIRLIQDQRNNPLWNPSRDDLVVVDANSGGSLDRFNKRYSSLFSVDSTTPNSSSETVELSEENKKKTQIKKEEKEDVSEKAFGMDDYLSLLDDSEQQIKSGKLASKKRDKK

SEQ ID NO: 143 - protein, 278 aa, Saccharomyces cerevisiae
MFSRLSLFRRAALAPAPMRMSFRTIYQKTEDELPRRIVPKLATFYSANPNHEDRINRLERLLRKYIKLPSQNNNEAQQTKAPWISFDEYALIGGGTKLKPTQYTQLLYMLNKLHNIDPQLTNDEITSELSQYYKKSSMLSNNIKIKTLDEFGRSIAVGKRKSSTAKVFVVRGTGEILVNGRQLNDYFLKMKDRESIMYPLQVIESVGKYNIFATTSGGGPTGQAESIMHAIAKALVVFNPLLKSRLHKAGVLTRDYRHVERKKPGKKKARKMPTWVKR

SEQ ID NO: 144 - protein, 366 aa, Saccharomyces cerevisiae
MFSRLPTSLARNVARRAPTSFVRPSAAAAALRFSSTKTMTVREALNSAMAEELDRDDDVFLIGEEVAQYNGAYKVSKGLLDRFGERRVVDTPITEYGFTGLAVGAALKGLKPIVEFMSFNFSMQAIDHVVNSAAKTHYMSGGTQKCQMVFRGPNGAAVGVGAQHSQDFSPWYGSIPGLKVLVPYSAEDARGLLKAAIRDPNPVVFLENELLYGESFEISEEALSPEFTLPYKAKIEREGTDISIVTYTRNVQFSLEAAEILQKKYGVSAEVINLRSIRPLDTEAIIKTVKKTNHLITVESTFPSFGVGAEIVAQVMESEAFDYLDAPIQRVTGADVPTPYAKELEDFAFPDTPTIVKAVKEVLSIE

SEQ ID NO: 145 - protein, 520 aa, Saccharomyces cerevisiae
MLKSASQNFFRAYSSRIGRYAATASGKLAQSRLSNIPTPKALKKFLDEYIVGQEIGKKVLSVAVYNHYLRINDKQKKGELQRQRELMEREKIADDRDEPIFSGNSESKAGWRNLQRQFNLAGREVDEDLELSKSNVLVVGPSGSGKTLLATTLAKILNVPIAITDCTQLTQAGYIGEDVEVCIERLLVNAEFDVARAEKGIIVLDEIDKLAKPAASIGTKDVSGEGVQQSLLKIIEGHKVEITVKRPVKHDIDGQKNQTTTKKDEVFVVDTSNILFMIMGAFVGLDKHIVKRIEDMKKIQKAGESVESSNSKEVEKERAKKFRFSNTLEQVELDNGKKVCALDLTTPTDLVSFGLIPELIGRVPIITALQPLQRDDLFHILKEPKNALLDQYEYIFKQFGVRLCVTQKALKKVAQFALKEGTGARGLRGIMERLLLNVNYDCPGSNIAYVLIDEATVDSLQETEHSLASQVDVKYYSGDEKDSLIRDVSEEDKKLGVMLEKELGHSANIHTPTIPKRSLT

SEQ ID NO: 146 - protein, 307 aa, Saccharomyces cerevisiae
MFKRQLSTSVRYLQHYDESLLSRYYPESLLKSIKLAQQTIPEDTKFRVSRNVEFAPPYLDDFTKIHPFWDYKPGMPHLHAQEENNNFSIFRWDQVQQPLPGEGNILPPGVSLPNDGGRKSKSADVAAGLHKQTGVDPDYITRKLTMKPLVMKRVSNQTGKGKIASFYALVVVGDKNGMVGLGEGKSREEMSKAIFKAHWDAVRNLKEIPRYENRTIYGDIDFRYHGVKLHLRSAKPGFGLRVNHVIFEICECAGIKDLSGKVYKSRNDMNIAKGTIEAFTKAQKTLDEVALGRGKKLVDVRKVYYSS

SEQ ID NO: 147 - protein, 105 aa, Saccharomyces cerevisiae
MLARSLGYRLISTSRILYNKPTVKSVVSSCPAGTSLNLNIWKSGKDAVALEDKEYPNWLWSVLDSDHVVEHAAEDPEGQALLKRRKNIRKANRQRIKQNNFLSQL

SEQ ID NO: 148 - protein, 146 aa, Saccharomyces cerevisiae
MKGSPISQFSKTSINALTRPWKKYRDGELFYGLSKVGNKRVPLTTKQGNKTMYKGTRASGIGRHTKFGGYVINWKKVRTYVTPDMVNFELKPYVNANVPPLKHEFKGFSGGPLDPRLQLLKIKEYIVNGRVQSEGATDTSCYKERG

SEQ ID NO: 149 - protein, 183 aa, Saccharomyces cerevisiae
MNSLIFGKQLAFHKIVPTTAIGWLVPLGNPSLQIPGQKQLGSIHRWLREKLQQDHKDTEDKDFFSNNGILLAVPKKKVSHQKKRQKLYGPGKKQLKMIHHLNKCPSCGHYKRANTLCMYCVGQISHIWKTHTAKEEIKPRQEEELSELDQRVLYPGRRDTKYTKDLKDKDNYLERRVRTLKKD

SEQ ID NO: 150 - protein, 492 aa, Saccharomyces cerevisiae
MFHAFTFLKGGRFYSSLTVKSLYEQVHHTSHDPISINGWIKSIRLLKRIAFLDLQDGTSVNPLRIVIPLTNTDEVQFLKILKTGQTLSISNATWQSTPNRKQPFELQIKNPVKSIKLVGPVSENYPLQKKYQTLRYLRSLPTLKYRTAYLSAILRLRSFVEFQFMLYFQKNHFTKVSPPILTSNDCEGAGELFQVSTNTSPTASSYFGKPTYLTVSTQLHLEILALSLSRCWTLSPCFRAEKSDTPRHLSEFWMLEVEMCFVNSVNELTSFVETTIKHIIKACIDNQQELLPKQFISSQENNASSELSINQETQQIKTRWEDLINEKWHNITYTNAIEILKKRHNEVSHFKYEPKWGQPLQTEHEKFLAGEYFKSPVFVTDYPRLCKPFYMKQNSTPDDTVGCFDLLVPGMGEIIGGSLREDDYDKLCREMKARGMNRSGELDWYVSLRKEGSAPHGGFGLGFERFISYLYGNHNIKDAIPFYRTSAESIDF

SEQ ID NO: 151 - protein, 135 aa, Saccharomyces cerevisiae
MFLRTQARFFHATTKKMDFSKMSIVGRIGSEFTEHTSANNNRYLKYSIASQPRRDGQTNWYNITVFNEPQINFLTEYVRKGALVYVEADAANYVFERDDGSKGTTLSLVQKDINLLKNGKKLEDAEGQENAASSE

SEQ ID NO: 152 - protein, 169 aa, Saccharomyces cerevisiae
MWSRNVRLLGSWTRSYMVPATKRKTIPVYPPVQRIASSQIMKQVALSEIESLDPGAVKRKLISKKNKDRLKAGDVVRIVYDSSKCSYDTFVGYILSIDRKQLVQDASLLLRNQIAKTAVEIRVPLFSPLIERIDLLTPHVSSRQRNKHYYIRGTRLDVGDLEAGLRRKK

SEQ ID NO: 153 - protein, 249 aa, Saccharomyces cerevisiae
MLQLRFMPGWVPRNGFFGLKETIGTVHKRFYALASEQPSRKTVKPLDSRKTFLIDTYKHLMENSSMIFFVHYNNLSKTEDHHFRFKIKQTGGKLTKVRNNLFEVYLRNSHLPDPCGFVKRKEQNWKHPLLPLLKGPTATITYEDTNPQQVAKLLKVLQSAQDKLMVIGAKVENEVLNVEKINTFKTLPTKPEMQSQLVSVLQMLSGLGLVRTLENSSNALYLTLKSHNDNQKPKEDVESTTDAESKGSK

SEQ ID NO: 154 - protein, 463 aa, Saccharomyces cerevisiae
MLSRATRTAAAKSLVKSKVARNVMAASFVKRHASTSLFKQANKVESLGSIYLSGKKISVAANPFSITSNRFKSTSIEVPPMAESLTEGSLKEYTKNVGDFIKEDELLATIETDKIDIEVNSPVSGTVTKLNFKPEDTVTVGEELAQVEPGEAPAEGSGESKPEPTEQAEPSQGVAARENSSEETASKKEAAPKKEAAPKKEVTEPKKADQPKKTVSKAQEPPVASNSFTPFPRTETRVKMNRMRLRIAERLKESQNTAASLTTFNEVDMSALMEMRKLYKDEIIKKTGTKFGFMGLFSKACTLAAKDIPAVNGAIEGDQIVYRDYTDISVAVATPKGLVTPVVRNAESLSVLDIENEIVRLSHKARDGKLTLEDMTGGTFTISNGGVFGSLYGTPIINSPQTAVLGLHGVKERPVTVNGQIVSRPMMYLALTYDHRLLDGREAVTFLKTVKELIEDPRKMLLW

SEQ ID NO: 155 - protein, 664 aa, Saccharomyces cerevisiae
MLTSILIKGRTPVLASRNLLAALSNCNHITWAVSRRLYNDGNRDQRNFGRNQRNNNSNRYRNSRFNSRPRTRSREDDDEVHFDKTTFSKLIHVPKEDNSKEVTLDSLLEEGVLDKEIHKAITRMEFPGLTPVQQKTIKPILSSEDHDVIARAKTGTGKTFAFLIPIFQHLINTKFDSQYMVKAVIVAPTRDLALQIEAEVKKIHDMNYGLKKYACVSLVGGTDFRAAMNKMNKLRPNIVIATPGRLIDVLEKYSNKFFRFVDYKVLDEADRLLEIGFRDDLETISGILNEKNSKSADNIKTLLFSATLDDKVQKLANNIMNKKECLFLDTVDKNEPEAHERIDQSVVISEKFANSIFAAVEHIKKQIKERDSNYKAIIFAPTVKFTSFLCSILKNEFKKDLPILEFHGKITQNKRTSLVKRFKKDESGILVCTDVGARGMDFPNVHEVLQIGVPSELANYIHRIGRTARSGKEGSSVLFICKDELPFVRELEDAKNIVIAKQEKYEPSEEIKSEVLEAVTEEPEDISDIVISLISSYRSCIKEYRFSERRILPEIASTYGVLLNDPQLKIPVSRRFLDKLGLSRSPIGKAMFEIRDYSSRDGNNKSYDYDDDSEISFRGNKNYNNRSQNRDYDDEPFRRSNNNRRSFSRSNDKNNYSSRNSNIY

SEQ ID NO: 156 - protein, 147 aa, Saccharomyces cerevisiae
MLAQTFKKPHRAVLEQVSGTTVFIRNKRTKSKSSLSPLAQRVVTQLSVMSASRKQPKLLKLAREDLIKHQTIEKCWSIYQQQQRERRNLQLELQYKSIERSMNLLQELSPRLFEAANASEKGKRFPMEMKVPTDFPPNTLWHYNFRK

SEQ ID NO: 157 - protein, 499 aa, Saccharomyces cerevisiae
MLRIRSLLNNKRAFSSTVRTLTINKSHDVVIIGGGPAGYVAAIKAAQLGFNTACVEKRGKLGGTCLNVGCIPSKALLNNSHLFHQMHTEAQKRGIDVNGDIKINVANFQKAKDDAVKQLTGGIELLFKKNKVTYYKGNGSFEDETKIRVTPVDGLEGTVKEDHILDVKNIIVATGSEVTPFPGIEIDEEKIVSSTGALSLKEIPKRLTIIGGGIIGLEMGSVYSRLGSKVTVVEFQPQIGASMDGEVAKATQKFLKKQGLDFKLSTKVISAKRNDDKNVVEIVVEDTKTNKQENLEAEVLLVAVGRRPYIAGLGAEKIGLEVDKRGRLVIDDQFNSKFPHIKVVGDVTFGPMLAHKAEEEGIAAVEMLKTGHGHVNYNNIPSVMYSHPEVAWVGKTEEQLKEAGIDYKIGKFPFAANSRAKTNQDTEGFVKILIDSKTERILGAHIIGPNAGEMIAEAGLALEYGASAEDVARVCHAHPTLSEAFKEANMAAYDKAIHC

SEQ ID NO: 158 - protein, 427 aa, Saccharomyces cerevisiae
MYSRKSLSLISKCGQLSRLNAQAALQARRHLSIHEYRSAQLLREYGIGTPEGFPAFTPEEAFEAAKKLNTNKLVIKAQALTGGRGKGHFDTGYKSGVHMIESPQQAEDVAKEMLNHNLITKQTGIAGKPVSAVYIVKRVDTKHEAYLSILMDRQTKKPMIIASSQGGMNIEEVAERTPDAIKKFSIETSKGLSPQMAKDVAKSLGFSPDAQDEAAKAVSNLYKIFMERDATQVEINPLSEIEHDPTHKIMCTDAKFGFDDNASFRQEKIYSWRDLSQEDPDEVKAKKYDLNFVKLKGNIGCLVNGAGLAMATMDVIKLNGGDPANFLDCGGGATPETIKQGFELILSNKNVDAIFVNIFGGIVRCDYVALGLVEAARELEVRVPIVARLQGTKVEEGRDIINKSGVKIYSFDELDPAAKKVVELTQN

SEQ ID NO: 159 - protein, 233 aa, Saccharomyces cerevisiae
MFAKTAAANLTKKGGLSLLSTTARRTKVTLPDLKWDFGALEPYISGQINELHYTKHHQTYVNGFNTAVDQFQELSDLLAKEPSPANARKMIAIQQNIKFHGGGFTNHCLFWENLAPESQGGGEPPTGALAKAIDEQFGSLDELIKLTNTKLAGVQGSGWAFIVKNLSNGGKLDVVQTYNQDTVTGPLVPLVAIDAWEHAYYLQYQNKKADYFKAIWNVVNWKEASRRFDAGKI

SEQ ID NO: 160 - protein, 266 aa, Saccharomyces cerevisiae
MFLRSVNRAVTRSILTTPKPAVVKSSWRVFTVANSKRCFTPAAIMRNQETQRVGDILQSELKIEKETLPESTSLDSFNDFLNKYKFSLVETPGKNEAEIVRRTESGETVHVFFDVAQIANLPYNNAMDENTEQNEDGINEDDFDALSDNFANVNVVISKESASEPAVSFELLMNLQEGSFYVDSATPYPSVDAALNQSAEAEITRELVYHGPPFSNLDEELQESLEAYLESRGVNEELASFISAYSEFKENNEYISWLEKMKKFFH

SEQ ID NO: 161 - protein, 224 aa, Saccharomyces cerevisiae
MASTLLTIITSILRCTGFILSKIAKGSRIRELLERCRSSLGVDLHSLLKQLCRDNLKCVALIFMLQLKFIWPVARITPIYRPFTSHPFRNLATSSSISSTKAKTTKTDTTPLKLSNELYAIFKIHNRPYLVTEGDRVILPFKLKQAEVGDILNMTDVTTLGSRNYKLVGHPINTSLYTLKATVVGKTKRAFQTREVTKRRNRRVRHAKSKGDLTILRISELSMN

SEQ ID NO: 162 - protein, 247 aa, Saccharomyces cerevisiae
MLHCARRYMLVRPRLLWQSGTCVARFQSSVRTPASEPSAEKGVDEWLEAINELREEFSAKEYLPETSLAPPGQSKVDLLQGSQAGSKIKPTAEQLAQWEALKSVPIPPRKNATLDHITNMIMRHGKKEKAQTILSRALYLVYCQTRQDPIQALEKSLDELAPLMMTKTFNTGVAKASVIPVPLNKRQRNRIAWNWIVQSANQRVSSDFAVRLGEELTAIAKGTSSAFEKRDQIHKTAIAHRAYIQLK

SEQ ID NO: 163 - protein, 264 aa, Saccharomyces cerevisiae
MFKSVAKLGKSPIFYLNSQRLIHIKTLTTPNENALKFLSTDGEMLFTQTRGSKSIVIKNTDENLINHSKLAQQIFLQCPGVESLMIGDDFLTINKDRMVHWNSIKPFTEIIDLLTKQLAYGEDVISKEFHAVQEEEGEGGYKINMPKFELTEEDEEVSELIEELIDTFTRIRPAILEDGGDIDYRGWDPKTGTVYLRLQGACTSCSSSEVTLKYGIESMLKHYVDEVKFTEVIQIMDPEQEIALKEFDKLEKKLESSKNTSHEK

SEQ ID NO: 164 - protein, 258 aa, Saccharomyces cerevisiae
MINTGRSRNSVLLAHRFLSTGGFWRGGTNGTMSRTINNVDPFKLKFTFIPKTVPAAADSVSPDSQRPGKKPFKFIVSDQSKSSKASKSPKWSSYAFPSRETIKSHEFTEAIKKQNKAIDEQIAAAVSKNDCSCTEPPKKRKRKLRPRKALITLSPKAIKHLRALLAQFTPEPKLIRVSARNRGCSGLTYDLQYETEPGKFDEVVEQDGVKFVIDSKALFSIIGSEMDWFTIDDKLASKFVFKNPNSKGTCGCGESFMV

SEQ ID NO: 165 - protein, 269 aa, Saccharomyces cerevisiae
MKWLLFPARIVARTRPNLFSLYRRSVSQYLRPRTIQNLQSMAQTPELKTKLFKPLVWIDCEMTGLDHVNDRIIEICCIITDGHLAPVKAADGQGDSHYESVIHYGPEVMNKMNEWCIEHHGNSGLTAKVLASEKTLAQVEDELLEYIQRYIPDKNVGVLAGNSVHMDRLFMVREFPKVIDHLFYRIVDVSSIMEVARRHNPALQARNPKKEAAHTAYSDIKESIAQLQWYMDNYLKPPQETESVESIGSEQPESPSSSTSSLKRQRTDF

SEQ ID NO: 166 - protein, 307 aa, Saccharomyces cerevisiae
MLISSRIVRSSLVNVPLRLSRCFTQAHRACKEEEVNSPLSSAAEQPEQKYTHFGSKTVLKSTKQKLVGDVFSSVANRYDLMNDVMSLGIHRLWKDHFINKLDAGKRPNSTTPLNFIDVAGGSGDIAFGLLDHAESKFGDTESTMDIVDINPDMLKEGEKRAMEQGKYFKDPRVRFLVSNGEKLEEIDSDSKDIYTVSFGIRNFTDIQKGLNTAYRVLKPGGIFYCLEFSKIENPLMDFAYQQWAKVLPVMGSMIANDYDSYQYLVESIERFPDQETFKSMIEKAGFKSAGYESLTFGICAIHWGIKV

SEQ ID NO: 167 - protein, 440 aa, Saccharomyces cerevisiae
RISSTLLQRSKQLIDKYALYVPKTGSFPKGFEVGYTASGVKKNGSLDLGVILNTNKSRPSTAAAVFTTNKFKAAPVLTSKKVLETARGKNINAIVVNSGCANSVTGDLGMKDAQVMIDLVNDKIGQKNSTLVMSTGVIGQRLQMDKISTGINKIFGEEKFGSDFNSWLNVAKSICTTDTFPKLVTSRFKLPSGTEYTLTGMAKGAGMICPNMATLLGFIVTDLPIESKALQKMLTFATTRSFNCISVDGDMSTNDTICMLANGAIDTKEINEDSKDFEQVKLQVTEFAQRLAQLVVRDGEGSTKFVTVNVKNALHFEDAKIIAESISNSMLVKTALYGQDANWGRILCAIGYAKLNDLKSLDVNKINVSFIATDNSEPRELKLVANGVPQLEIDETRASEILALNDLEVSVDLGTGDQAAQFWTCDLSHEYVTINGDYRS

SEQ ID NO: 168 - protein, 183 aa, Saccharomyces cerevisiae
MNSYSLLTRSFHESSKPLFNLASTLLKASKRTQLRNELIKQGPKRPTSAYFLYLQDHRSQFVKENPTLRPAEISKIAGEKWQNLEADIKEKYISERKKLYSEYQKAKKEFDEKLPPKKPAGPFIKYANEVRSQVFAQHPDKSQLDLMKIIGDKWQSLDQSIKDKYIQEYKKAIQEYNARYPLN

SEQ ID NO: 169 - protein, 706 aa, Saccharomyces cerevisiae
MDKLTPSQWKVINKSYEPASTIKVIAGPGSGKTLTLLYKVLHLITVENIKPEEILIFSLTNKAVDSIIENLLSIFENSHTNKEIVHQIGCYTVHGLANRIVVENEGMINIIEEIGWRGLMKLLPPSKRTPHHFRSYKELEKVVKDYKLNNAKNNNPVIEKLVELMDNCKVMTNDDLIIRAKKYLELDSSDSDASSFTQDLRNKYKVVLIDEFQDLYPSLAPLITMICKGKQLIMFGDTNQSIYGFLGSNNEIMSQLDNLHPKNSTTVLKLFDNFRSTPEIISLASKIINRPLAEKQIIDDTDETPSELVRKLPSGVSPQIMTFDDLAAESEFIIDKITQLICSSAKFSDIAILSRTNSHLTAIASILKKYGIPYQKLKSQPDWMDDLRIQFLLDILKVCSLASDEKHNREFNTGDKWQSNFSILVTMSALKGIGDASIQALYKACSLKNLSIWKYLTMVPNFEWPLGLSIKKKMENYTSNLYEMIENDQVHQLDDPMELLEKVASITNNLNLNPTYFQSLSDAQSSLEFKTHLQEMAQVMKVSKSNKPPGISFVKWFLETYFDQTMVFHQSQQALQTTGPGTVKLSTIHSAKGLEFPIVFLTNGSMSNFPMDTNALYVGITRARNLLYMCNMKHERLVSKSSPYSRNIMSNNLFWTYYNKDLKRSVCDVKVTHGYNVQRYNQLRKNFGFYRAYSSLRGCKSVFRRI

SEQ ID NO: 170 - protein, 285 aa, Saccharomyces cerevisiae
MKFLLQQIRNMHVKPIKMRWLTGGVNYSYLLSTEDRRNSWLIDPAEPLEVSPKLSAEEKKSIDAIVNTHHHYDHSGGNLALYSILCQENSGHDIKIIGGSKSSPGVTEVPDNLQQYHLGNLRVTCIRTPCHTKDSICYYIKDLETGEQCIFTGDTLFIAGCGRFFEGTGRDMDMALNQIMLRAVGETNWNKVKIYPGHEYTKGNVSFIRAKIYSDIGQNKEFDALEQYCKSNECTTGHFTLRDELGYNPFMRLDDRAVRLAVGDTAGTYPRSVVMQELRKLKNAM

SEQ ID NO: 171 - protein, 329 aa, Saccharomyces cerevisiae
MLRSTVSKASLKICRHFHRESIPYDKTIKNLLLPKDTKVIFQGFTGKQGTFHASISQEYGTNVVGGTNPKKAGQTHLGQPVFASVKDAIKETGATASAIFVPPPIAAAAIKESIEAEIPLAVCITEGIPQHDMLYIAEMLQTQDKTRLVGPNCPGIINPATKVRIGIQPPKIFQAGKIGIISRSGTLTYEAVQQTTKTDLGQSLVIGMGGDAFPGTDFIDALKLFLEDETTEGIIMLGEIGGKAEIEAAQFLKEYNFSRSKPMPVASFIAGTVAGQMKGVRMGHSGAIVEGSGTDAESKKQALRDVGVAVVESPGYLGQALLDQFAKFK

SEQ ID NO: 172 - protein, 344 aa, Saccharomyces cerevisiae
MTLAELLGRSRIAQVANNHKPLTYTGKKFHPTHQIIETKPSTLYRQEWGLKSAIPSKIKSRYLVYNDLDTLERITTFEPRGGTQWNRLRFQEMGVPIVSNIGRQNPFFKYISRPEDESHAKLSLFKEMKGDTDISPAAMKKRLKKITALIRSFQDEFKEWLVENHPDELKLNSNKLEDYVVKFLNKKLETKTNKKFNTEIIGTGGLSYSLPGKLKNSPNGVIQRTVVPGRILNVVKENNDNKWLAAIGGFVADVVFFQSPPSSFNSMGDFIRMKTFLFEILEASMEKNGSVSMHARLLEPQNDKTREFFNKRPIYKPLTSRRARRPSVGNIQEANNLLNIIKGN

SEQ ID NO: 173 - protein, 165 aa, Saccharomyces cerevisiae [sequence omitted]

SEQ ID NO: 174 - protein, 172 aa, Saccharomyces cerevisiae
MLKIVTRAGHTARISNIAAHLLRTSPSLLTRTTTTTRFLPFSTSSFLNHGHLKKPKPGEELKITFILKDGSQKTYEVCEGETILDIAQGHNLDMEGACGGSCACSTCHVIVDPDYYDALPEPEDDENDMLDLAYGLTETSRLGCQIKMSKDIDGIRVALPQMTRNVNNNDFS

SEQ ID NO: 175 - protein, 488 aa, Saccharomyces cerevisiae
MLRFTNCSCKTFVKSSYKLNIRRMNSSFRTETDAFGEIHVPADKYWGAQTQRSFQNFKIGGARERMPLPLVHAFGVLKKSAAIVNESLGGLDPKISKAIQQAADEVASGKLDDHFPLVVFQTGSGTQSNMNANEVISNRAIEILGGKIGSKQVHPNNHCNQSQSSNDTFPTVMHIAASLQIQNELIPELTNLKNALEAKSKEFDHIVKIGRTHLQDATPLTLGQEFSGYVQQVENGIQRVAHSLKTLSFLAQGGTAVGTGLNTKPGFDVKIAEQISKETGLKFQTAPNKFEALAAHDAIVECSGALNTLACSLFKIAQDIRYLGSGPRCGYHELMLPENEPGSSIMPGKVNPTQNEALTQVCVQVMGNNAAITFAGSQGQFELNVFKPVMIANLLNSIRLITDAAYSFRVHCVEGIKANEPRIHELLTKSLMLVTALNPKIGYDAASKVAKNAHKKGITLKESALELGVLTEKEFDEWVVPEHMLGPK

SEQ ID NO: 176 - protein, 474 aa, Saccharomyces cerevisiae
MEVTSMFLNRMMKTRTGLYRLYSTLKVPHVEINGIKYKTDPQTTNVTDSIIKLTDRSLHLKESHPVGILRDLIEKKLNSVDNTFKIFNNFKPVVTTMENFDSLGFPKDHPGRSKSDTYYINETHLLRTHTSAHELECFQKIRNDSDNIKSGFLISADVYRRDEIDKTHYPVFHQMEGATIWKRTKADVGVKEPMYIEKIREDIRQVENLLNKENVKITVDDDTIPLKENNPKQEYMSDLEVDLCSQHLKRSIELIVSEVFNKKISSMIKNKANNTPKELKVRWINAYFPWTAPSWEIEVWWQGEWLELCGCGLIRQDVLLRAGYKPSETIGWAFGLGLDRIAMLLFEIPDIRLLWSRDERFSRQFSKGLITSFKPYSKHPGSFRDVAFWLPEDKPDIHQVHENDLMEIIRNIAGDLVESVKLVDSFTHPKTGRKSMCYRINYQSMDRNLTNAEVNTLQDMVCSKLVKEYSVELR

SEQ ID NO: 177 - protein, 185 aa, Saccharomyces cerevisiae
MQAKLLFTRLNFRRPSTTLRQFPLTCFLFHSKAFYSDLVTKEPLITPKRIINKTPGLNLSISERASNRLAEIYRNSKENLRISVESGGCHGFQYNLTLEPATKPDIKNDVKDKEFSDDLDDDDSKDIIYVLPEDKGRVIIDSKSLNILNNTTLTYTNELIGSSFKIINGSLKSSCGCGSSFDIEN

SEQ ID NO: 178 - DNA, 750 bp, Glycine max
ataattttgattttattgaattttttttttatttttgccaattctatttattctttctaataatcaaaaatattctaataactaataataaaaaggaaaataaagattcattagaatattataaaataacaaataatagaacaaaacaagattctttagttatatatgtaaaacaaaaatggtttatttataagaatacatattccattctatatcaaaacaaaatataaaaatttggaatagattctatgaaatctcaaaaaatcccgctattcaattattcattaaacatatgaatattagtgcatattattttatcgattagattaaatagattatctatatatatagatagatatctatttgaattgcttcattcgcgaggagccgtatgaggtgaaaatctcatgtacggttctgtaataaagatggaattgagaaacaaccatcaattataacccccaaagaaccagatttcgtaaacaacatagaggaagaatgaaaggaatatcctatcgagggaatcatatttgcttcggaagatatgctcttcaagcacttgagccagcttggataacatctagacaaatagaagcgggacggcgggcaatgtcacgaaatgttcgccgaggtggacaaatatgggtacgcatatttccagacaaaccggttacagtaagacctactgaaacacgtatgggttcaggaaaaggttctcccgaatattgggtagctgtcgttaaacctggg

SEQ ID NO: 179 - protein, 552 aa, Pisum sativum
MNQAMATPLSLSCCSPTLTRSTLFFTKTFPFSRSFSTPLPLSTKTLISLSPPHRTFAVRAESQNGADPARQYDFDLFTIGAGSGGVRASRFASNFGASSAVCELPFSTISSDTTGGVGGTCVIRGCVPKKLLVYASKFSHEFEESNGFGWRYDSEPKHDWSSLIANKNAELQRLTGIYKNTLKNAGVKLIEGRGKIVDAHTVDVDGKLYSAKHILVSVGGRPFIPDIPGKEYAIDSDAALDLPSKPQKIAIVGGGYIALEFAGIFNGLKSEVHVFIRQKKVLRGFDEEIRDFVAENMALRGIEFHTEESPVAITKAADGSLSLKTNKGTEEGFSHIMFATGRSPNTKDLGLESVGVKVAKDGSIEVDEYSQTSVPSIWAIGDATNRVNLTPVALMEGVALAKTLFQNEPTKPDYRAIPSAVFSQPPIGGVGLTEEQAAEQYGDIDVFTANFRPMKATLSGLPDRVFMKLIVSAETNVVLGLHMCGEDAAEIAQGFAVGIKAGLTKADFDATVGIHPTAAEEFVTMRTPTRKVRKNQASQGKSDSKAKAVAGS

SEQ ID NO: 180 - protein, 735 aa, Chlamydomonas reinhardtii
MAATYSLATSPLTRSTPIPFSTKRVPSGRSSGALPVPGSQARLSGAGAVALDGLEGGRDDWHQRYSLSTSGRRRSVASGAPSNTGSSEAKNVVMASWNVTVGFSVGASSSAFSDASSFSFPARSAPAGPVARPPRTGVSLLSRALSTGEKEQDLLAHLPPVLPSTDAADPLLFFPGIPLELLREAQAEFPIFNNELLVHAYGLAARAHQNQQRKNGESLLSHCVAVAKTVAGLGLDAETVAAALLHECVDMVSRSQLEEFMPPSVVSVLEHVNTISEMSRLYRQHSATGSFSDETFQRLLVGFEDVKAVIVKLSDRLAELRTISVLPADRQAALARETLEVYSVVADRLGVWCLKAELEDLAFSVLHPQEYNWLKEAVRTRQDPVALETAINSIKGALQAQGVAYEDISGRPKNLYGIFMKLQKDGKPLTIESLNSLYDLMALRVVVAHKHECYTALRAVQSVYRVMPSRSKDFIKDIKKPNGYQSLHETVYGEGDVPVEVQIRTHKMHYIAEYGFAAHWKYKEQMDSEDEWLEKETQYKRWLTQYKLRVHDKKVRPQGSPPTDSSLKSLGVAYMDMPEEQQRGLLDPFLQHERFKLQVPAKTEVSVLLQTCDGIETKDFPLGTTANQLWRDLGLGAQPGYALTVNSRLPSGEAALQSGDLVQVLPLSTILSRSPPQSAPLAAVLEDWEEEQAHAAAEAAALAASANNYLEVYSRDGMTTWSMGPNAGAAVPAGM

SEQ ID NO: 181 - protein, 260 aa, Pisum sativum
MAAAHTPREENVYMAKLAEQAERYEEMVEFMEKVSANADSEELTVEERNLLSVAYKNVIGARRASWRIISSIEQKEESRGNEDHVDVIRDVRSKIESELSNICDGILKLLDTRLIPSASSGDSKVFYLKMKGDYHRYLAEFKTGAERKEAAESTLAAYKSAQDIANAELPPTHPIRLGLALNFSVFYYEILNSPDRACNLAKQAFDEAIAELDTLGEESYKDSTLIMQLLRDNLTLWTSDMQDDGADEIKEHAPKADEQQ

SEQ ID NO: 182 - protein, 564 aa, Arabidopsis thaliana
MEALQFSSVNRVPCTLSCTGNRRIKAAFSSAFTGGTINSASLSSSRNLSTREIWSWVKSKTVVGHGRYRRSQVRAVMFGQLTGGLEAAWSKLKGEEVLTKDNIAEPMRDIRRALLEADVSLPVVRRFVQSVSDQAVGMGVIRGVKPDQQLVKIVHDELVKLMGGEVSELQFAKSGPTVILLAGLQGVGKTTVCAKLACYLKKQGKSCMLIAGDVYRPAAIDQLVILGEQVGVPVYTAGTDVKPADIAKQGLKEAKKNNVDVVIMDTAGRLQIDKGMMDELKDVKKFLNPTEVLLVVDAMTGQEAAALVTTFNVEIGITGAILTKLDGDSRGGAALSVKEVSGKPIKLVGRGERMEDLEPFYPDRMAGRILGMGDVLSFVEKATEVMRQEDAEDLQKKIMSAKFDFNDFLKQTRAVAKMGSMTRVLGMIPGMGKVSPAQIREAEKNLLVMEAMIEVMTPEERERPELLAESPERRKRIAKDSGKTEQQVSALVAQIFQMRVKMKNLMGVMEGGSIPALSGLEDALKAEQKAPPGTARRKRKADSRKKFVESASSKPGPRGFGSGN

SEQ ID NO: 183 - protein, 525 aa, PISUM SATIVUM
  MISC_FEATURE (181)..(181): Xaa can be any naturally occurring amino acid
EFGTRNSFAREIWGLVQSKSLTSRRTDMIRPVVVRAEMFGQLTSGLESAWNKLKREEVLTKENIVEPMRDIRRARADVSLPVVRRFVQSVTDKAVGVGVTRGVKPDQQLVKIVHDELVQLMGGEVSELTFANSGPTVILLAGLQGVGKTTVCAKLATYFKKQGKSCMLVAGDVYRPAAIDXLTILGKQVDVPVYAAGTDVKPSVIAKQGFEEAKKKKIDVVIVDTAGSLQIDKAMMDELKEVKQVLNPTEVLLVVDAMTGQEAAALVTTFNLEIGITGAILTKLDGDSRGGAALSVKEVSGKPIKLVGRGERMEDLEPFYPDRMAGRILGMGDVLSFVEKAQEVMLEEDAEDMQKKIMSAKFDFNDLLKQTRTVAKMGSVSRVLGMIPGMAKVTPAQIREAEKNLQFMEVIIEAMTPEERGKPELLAEFPVRRKSVAQESGKTEQQVSQLVAQLFQMRVRMKKLMGVMEGGSMPTLSNLEEALKANKKAPPGTARRKKKGGLKRLFKGRSSKISLPAPRGFGSKN

SEQ ID NO: 184 - protein, 376 aa, Arabidopsis thaliana
MQKVFLAMDTCALVIHQSLSRIKLSPPKSSSSSSSSSSAFSPESLPIRRIELCFRGAICAAVQRNYEETTSSVEEAEEDDESSSSYGEVNKIIGSRTAGEGAMEYLIEWKDGHSPSWVPSSYIAADVVSEYETPWWTAAKKADEQALSQLLEDRDVDAVDENGRTALLFVAGLGSDKCVRLLAEAGADLDHRDMRGGLTALHMAAGYVRPEVVEALVELGADIEVEDERGLTALELAREILKTTPKGNPMQFGRRIGLEKVINVLEGQVFEYAEVDEIVEKRGKGKDVEYLVRWKDGGDCEWVKGVHVAEDVAKDYEDGLEYAVAESVIGKRVGDDGKTIEYLVKWTDMSDATWEPQDNVDSTLVLLYQQQQPMNE

SEQ ID NO: 185 - protein, 364 aa, Spinacia oleracea
MACSLSFSSSVSTFHLPTTTQSTQAPPNNATTLPTTNPIQCANLRELRDRIGSVKNTQKITEAMKLVAAAKVRRAQEAVVNGRPFSETLVEVLYNMNEQLQTEDVDVPLTKIRTVKKVALMVVTGDRGLCGGFNNMLLKKAESRIAELKKLGVDYTIISIGKKGNTYFIRRPEIPVDRYFDGTNLPTAKEAQAIADDVFSLFVSEEVDKVEMLYTKFVSLVKSDPVIHTLLPLSPKGEICDINGKCVDAAEDELFRLTTKEGKLTVERDMIKTETPAFSPILEFEQDPAQILDALLPLYLNSQILRALQESLASELAARMTAMSNATDNANELKKTLSINYNRARQAKITGEILEIVAGANACV

SEQ ID NO: 186 - protein, 147 aa, Spinacia oleracea
MAATTTTMMGMATTFVPKPQAPPMMAALPSNTGRSLFGLKTGSRGGRMTMAAYKVTLVTPTGNVEFQCPDDVYILDAAEEEGIDLPYSCRAGSCSSCAGKLKTGSLNQDDQSFLDDDQIDEGWVLTCAAYPVSDVTIETHKEEELTA

SEQ ID NO: 187 - protein, 147 aa, Spinacia oleracea; identical to SEQ ID NO: 186

SEQ ID NO: 188 - protein, 364 aa, Spinacia oleracea; identical to SEQ ID NO: 185

SEQ ID NO: 189 - protein, 179 aa, Oryza sativa (japonica cultivar-group)
MAMASTAVSSTLPLFHVRTASSAPAALRFTTRGRGGGRHSVACNSTAASSPKVLELGDAIAGLTLEEARGLVDHLQERLGVSAAAFAPAAVVAAPGAAGGGEDGAPAEKTEFDVVIEEVPSSARIATIKVVRALTNLALKEAKDLIEGLPKKAKEAVSKEEAEEAKKQLEEVGAKVSIA

SEQ ID NO: 190 - protein, 185 aa, Oryza sativa (japonica cultivar-group)
MASTALSSAFSLLSLPSSSSPAAAAAAAPRSFAVPSRARPRRAVAVVASTATESPKVLELGDAIAGLTLEEARGLVDHLQERLGVSAAAFAPAAVVAAPGAGGAGAAADEAPAEKTEFDVVIEEVPSSARIASIKVVRALTNLALKEAKDLIEGLPKKVKEGVSKDEAEDAKKQLEEVGAKVSIA

SEQ ID NO: 191 - protein, 1259 aa, Pisum sativum
MPMAASTSTSSLSVVGTNLSLPPHRHHRHFHSPSSISTRIRTNRLFLSSSLAFSSPRDARVVHAGLGLRRNTPDVWKHYSSVLSQPTAPVPVRQSCTSCCLASAKKRRSNLPRFVPGAFFDSSSFGLSKDKLRHASVKRVQLPHATVGPDEPHAASTTWQEGVAEKQDLSLFDSELERLEGFLGSELPSHPKLHRGQLKNGIRYLILPNKVPPTRFEAHMEVHVGSIDEEDDEQGIAHMIEHVAFLGSKKREKLLGTGARSNAYTDFHHTVFHIHSPTSTKDSDDLLPSVLDALNEITFHPNFLASRIEKERRAILSELQMMNTIEYRVDCQLLQHLHSENKLSKRFPIGLEEQIKKWDADKIRKFHERWYFPANATLYIVGDIGNIPKTVNQIEAVFGQTGVDNEKGSVATSSAFGAMASFLVPKLSVGLGGNSIERPTNTTDQSKVFKKERHAVRPPVKHTWSLPGSSANLKPPQIFQHELLQNFSINMFCKIPVNKVQTYRDLRIVLMKRIFLSALHFRINTRYKSSNPPFTSVELDHSDSGREGCTVTTLTITAEPKNWQNAIRVAVHEVRRLKEFGVTQGELTRYLDALLRDSEHLAAMIDNVSSVDNLDFIMESDALGHKVMDQSQGHESLIAVAGTVTLDEVNSVGAQVLEFIADFGKLSAPLPAAIVACVPKKVHIEGAGETEFKISSTEITDAMKAGLDEPIEPEPELEVPKELVQSSTLQELKNQRKPAFIPVSPEIEAKKLHDEETGITRLRLANGIPVNYKISKSETQSGVMRLIVGGGRAAEGSDSRGSVIVGVRTLSEGGRVGNFSREQVELFCVNNQINCSLESTEEFISLEFRFTLRNNGMRAAFQLLHMVLEHSVWSDDALDRARQVYLSYYRSIPKSLERSTAHKLMVAMLDGDERFTEPTPSSLENLTLQSVKDAVMNQFVGNNMEVSIVGDFTEEEIESCILDYLGTAQATGNFKNQQQIIPPTFRLSPSSLQSQEVFLNDTDERACAYIAGPAPNRWGFTADGNDLLETIDNASSVNNNGTKSDALQTEGAPRRSLRSHPLFFGITMGLLSEIINSRLFTTVRDSLGLTYDVSFELNLFDRLKLGWYVVSVTSTPSKVHKAVDACKNVLRGLHSNGITVRELDRAKRTLLMRHEAEIKSNAYWLGLLAHLQSSSVPRKDLSCIKDLTSLYEAATIEDTCLAYEQLKVDEDSLYSCIGVSGAQAAQDIAAPVEEEEAGEGYPGVLPMGRGLSTMTRPTT

SEQ ID NO: 192 - protein, 332 aa, Arabidopsis thaliana
MAASLQSTATFLQSAKIATAPSRGSSHLRSTQAVGKSFGLETSSARLTCSFQSDFKDFTGKCSDAVKIAGFALATSALVVSGASAEGAPKRLTYDEIQSKTYMEVKGTGTANHSPTIDGGSETFSFKPGKYAGKKFCFEPTSFTVKADSVSKNAPPEFQNTKLMTRLTYTLDEIEGPFEVASDGSVNFKEEDGIDYAAVTVQLPGGERVPFLFTVKQLDASGKPDSFTGKFLVPSYRGSSFLDPKGRGGSTGYDNAVALPAGGRGDEEELVKENVKNTAASVGEITLKVTKSKPETGEVIGVFESLQPSDTDLGAKVPKDVKIQGVWYGQLE

SEQ ID NO: 193 - DNA, 255 bp, Oryza sativa
gagcagtcggtgtcccccggcggcggcgcgtggctcggcgggcagctgttctccgccatggtggtgcgcaagccggcgcacctgttcctcgacgagctcggcgtcgcgtacgacgagcaggaggactacgtcgtcatcaagcacgccgcgctcttcacctccaccgtcatgagccgcctcctggcgcgccccaacgtgaagctgttcaacgccgtcgccgtcgaggacctcatcgtcaaggagggccgcgtcggc

SEQ ID NO: 194 - DNA, 606 bp, oryza sativa (japonica cultivar-group)
  misc_feature (349)..(349): n is a, c, g, or t
cagagcaagaagctcagctcctcctcctctcgcatggcagccatggccaccaccgcgtccagcctcctcaagacctccttcgccggcgtgcgcctccccgccgccgcccgcaaccccaccgtctccgtcgcgccgcgcaccggcggcgccatctgcaactccatctcgtcgtcgtcgtccactcccccctacgacctcaacgccatcaggttcagccccatcaaggagtccatcgtgtcccgcgagatgacccggcggtacatgaccgacatgatcacctacgccgacaccgacgtcgtcgtcgtcggcgccggctccgcggggctctcctgcgcgtacgagctctccnaggacccctccgtcagcgtcgccgtcatcgagcagtcggtgtcccccggcggcggcgcgtggctcggcgggcagctgttctccgccatggtggtgcgcaagccggcgcacctgttcctcgacgagctcggcgtcgcgtacgacgagcaggaggactacgtcgtcatcaagcacgccgcgctcttcacctccaccgtcatgagccgcctcctggcgcgccccacgtgaaactgttcaacgccgtcgccgtcgaggacc

SEQ ID NO: 195 - DNA, 4465 bp, Homo sapiens
gcggaccggccgggtggaggccacacgctaccccgaggctgcgtaggccgcgcgaagggggacgccgtgccgtgggcctggggtcgggggagcagcagaccgggaagcaccgtgaggaccgaggatttggggtggaaggcaggcatggtcaaacccatttcactgacaggagagcagagacaggacgtgtctctctccacgtcttccagccagtaaaagaagccaagctggagcccaaagccaggtgttctgactcccagcgtgggggtccctgcaccaaccatgagccgcctgctctggaggaaggtggccggcgccaccgtcgggccagggccggttccagctccggggcgctgggtctccagctccgtccccgcgtccgaccccagcgacgggcagcggcggcggcagcagcagcagcagcagcagcagcagcagcaacagcagcctcagcagccgcaagtgctatcctcggagggcgggcagctgcggcacaacccattggacatccagatgctctcgagagggctgcacgagcaaatcttcgggcaaggaggggagatgcctggcgaggccgcggtgcgccgcagcgtcgagcacctgcagaagcacgggctctgggggcagccagccgtgcccttgcccgacgtggagctgcgcctgccgcccctctacggggacaacctggaccagcacttccgcctcctggcccagaagcagagcctgccctacctggaggcggccaacttgctgttgcaggcccagctgcccccgaagcccccggcttgggcctgggcggagggctggacccggtacggccccgagggggaggccgtacccgtggccatccccgaggagcgggccctggtgttcgacgtggaggtctgcttggcagagggaacttgccccacattggcggtggccatatccccctcggcctggtattcctggtgcagccagcggctggtggaagagcgttactcttggaccagccagctgtcgccggctgacctcatccccctggaggtccctactggtgccagcagccccacccagagagactggcaggagcagttagtggtggggcacaatgtttcctttgaccgagctcatatcagggagcagtacctgatccagggttcccgcatgcgtttcctggacaccatgagcatgcacatggccatctcagggctaagcagcttccagcgcagtctgtggatagcagccaagcagggcaaacacaaggtccagccccccacaaagcaaggccagaagtcccagaggaaagccagaagaggcccagcgatctcatcctgggactggctggacatcagcagtgtcaacagtctggcagaggtgcacagactttatgtaggggggcctcccttagagaaggagcctcgagaactgtttgtgaagggcaccatgaaggacattcgtgagaacttccaggacctgatgcagtactgtgcccaggacgtgtgggccacccatgaggttttccagcagcagctaccgctcttcttggagaggtgtccccacccagtgactctggccggcatgctggagatgggtgtctcctacctgcctgtcaaccagaactgggagcgttacctggcagaggcacagggcacttatgaggagctccagcgggagatgaagaagtcgttgatggatctggccaatgatgcctgccagctgctctcaggagagaggtacaaagaagacccctggctctgggacctggagtgggacctgcaagaatttaagcagaagaaagctaagaaggtgaagaaggaaccagccacagccagcaagttgcccatcgagggggctggggcccctggtgatcccatggatcaggaagacctcggcccctgcagtgaggaggaggagtttcaacaagatgtcatggcccgcgcctgcttgcagaagctgaaggggaccacagagctcctgcccaagcggccccagcaccttcctggacaccctggatggtaccggaagctctgcccccggctagacgaccctgcatggaccccgggccccagcctcctcagcctgcagatgcgggtcacacctaaactcatggcacttacctgggatggcttccctctgcactactcagagcgtcatggctggggctacttggtgcctgggcggcgggacaacctggccaagctgccgacaggtaccaccctggagtcagctggggtggtctgcccctacagagccatcgagtccctgtacaggaagcactgtctcgaacaggggaagcagcagctgatgccccaggaggccggcctggcggaggagttcctgctcactgacaatagtgccatatggcaaacggtagaagaactggattacttagaagtggaggctgaggccaagatggagaacttgcgagctgcagtgccaggtcaacccctagctctgactgcccgtggtggccccaaggacacccagcccagctatcaccatggcaatggaccttacaacgacgtggacatccctggctgctggtttttcaagctgcctcacaaggatggtaatagctgtaatgtgggaagcccctttgccaaggacttcctgcccaagatggaggatggcaccctgcaggctggcccaggaggtgccagtgggccccgtgctctggaaatcaacaaaatgatttctttctggaggaacgcccataaacgtatcagctcccagatggtggtgtggctgcccaggtcagctctgccccgtgctgtgatcaggcaccccgactatgatgaggaaggcctctatggggccatcctgccccaagtggtgactgccggcaccatcactcgccgggctgtggagcccacatggctcaccgccagcaatgcccggcctgaccgagtaggcagtgagttgaaagccatggtgcaggccccacctggctacacccttgtgggtgctgatgtggactcccaagagctgtggattgcagctgtgcttggagacgcccactttgccggcatgcatggctgcacagcctttgggtggatgacactgcagggcaggaagagcaggggcactgatctacacagtaagacagccactactgtgggcatcagccgtgagcatgccaaaatcttcaactacggccgcatctatggtgctgggcagccctttgctgagcgcttactaatgcagtttaaccaccggctcacacagcaggaggcagctgagaaggcccagcagatgtacgctgccaccaagggcctccgctggtatcggctgtcggatgagggcgagtggctggtgagggagttgaacctcccagtggacaggactgagggtggctggatttccctgcaggatctgcgcaaggtccagagagaaactgcaaggaagtcacagtggaagaagtgggaggtggttgctgaacgggcatggaaggggggcacagagtcagaaatgttcaataagcttgagagcattgctacgtctgacataccacgtaccccggtgctgggctgctgcatcagccgagccctggagccctcggctgtccaggaagagtttatgaccagccgtgtgaattgggtggtacagagctctgctgttgactacttacacctcatgcttgtggccatgaagtggctgtttgaagagtttgccatagatgggcgcttctgcatcagcatccatgacgaggttcgctacctggtgcgggaggaggaccgctaccgcgctgccctggccttgcagatcaccaacctcttgaccaggtgcatgtttgcctacaagctgggtctgaatgacttgccccagtcagtcgcctttttcagtgcagtcgatattgaccggtgcctcaggaaggaagtgaccatggattgtaaaaccccttccaacccaactgggatggaaaggagatacgggattccccagggtgaagcgctggatatttaccagataattgaactcaccaaaggctccttggaaaaacgaagccagcctggaccatagcactgcctggaggctctgtatttgctcccgtggagcttcatcggggtggtgcaggctcccaaactcaggctttcagctgtgctttttgcaaaagggcttgcctaaggccagccatttttcagtagcaggacctgccaagaagattccttctaactgaaggtgcagttgaattcagtgggttcagaaccaagatgccaacatcggtgtggactacaggacaaggggcattgttgcttgttgggtaaaaatgaagcagaagccccaaagttcacattaactcaggcatttcatttattttttccttttcttcttggctggttctttgttctgtcccccatgctctgatgcagtgccctagaaggggaaagaattaatgctctaacgtgataaacctgctccaaggcagtggaaataaaaagaaggaaaaaaaagaaaaaaaaaaaaaaaaaaaaaaaaaaaaaat

SEQ ID NO: 196 - DNA, 21 bp, artificial sequence
  Target sequence 1
aaggtggccggcgccaccgtc

SEQ ID NO: 197 - DNA, 21 bp, artificial sequence
  Sense Strand siRNA 1
gguggccggcgccaccguctt

SEQ ID NO: 198 - DNA, 21 bp, artificial sequence
  Antisense Strand siRNA 1
gacgguggcgccggccacctt

SEQ ID NO: 199 - DNA, 21 bp, artificial sequence
  Target Sequence 2
aacagcagcctcagcagccgc

SEQ ID NO: 200 - DNA, 21 bp, artificial sequence
  Sense Strand siRNA 2
cagcagccucagcagccgctt

SEQ ID NO: 201 - DNA, 21 bp, artificial sequence
  Antisense strant siRNA 2
gcggcugcugaggcugcugtt

SEQ ID NO: 202 - DNA, 21 bp, artificial sequence
  Target Sequence 3
aagtgctatcctcggagggcg

SEQ ID NO: 203 - DNA, 21 bp, artificial sequence
  Sense Strand siRNA 3
gugcuauccucggagggcgtt

SEQ ID NO: 204 - DNA, 21 bp, artificial sequence
  Antisense strand siRNA 3
cgcccuccgaggauagcactt

SEQ ID NO: 205 - DNA, 21 bp, artificial sequence
  Target Sequence 4
aacccattggacatccagatg

SEQ ID NO: 206 - DNA, 21 bp, artificial sequence
  Sense Strand siRNA 4
cccauuggacauccagaugtt

SEQ ID NO: 207 - DNA, 21 bp, artificial sequence
  Antisense Strand siRNA 4
caucuggauguccaaugggtt

SEQ ID NO: 208 - DNA, 21 bp, artificial sequence
  Target Sequence 5
aaatcttcgggcaaggagggg

SEQ ID NO: 209 - DNA, 21 bp, artificial sequence
  Sense Strand siRNA 5
aucuucgggcaaggaggggtt

SEQ ID NO: 210 - DNA, 21 bp, artificial sequence
  Antisense Strand siRNA 5
ccccuccuugcccgaagautt

SEQ ID NO: 211 - DNA, 21 bp, artificial sequence
  Target Sequence 5
aaggaggggagatgcctggcg

SEQ ID NO: 212 - DNA, 21 bp, artificial sequence
  Sense Strand siRNA 6
ggaggggagaugccuggcgtt

SEQ ID NO: 213 - DNA, 21 bp, artificial sequence
  Antisense Strand siRNA 6
cgccaggcaucuccccucctt

SEQ ID NO: 214 - DNA, 21 bp, artificial sequence
  Target Sequence 7
aagcacgggctctgggggcag

SEQ ID NO: 215 - DNA, 21 bp, artificial sequence
  Sense Strand siRNA 7
gcacgggcucugggggcagtt

SEQ ID NO: 216 - DNA, 21 bp, artificial sequence
  Antisense Strand siRNA 7
cugcccccagagcccgugctt

SEQ ID NO: 217 - DNA, 21 bp, artificial sequence
  Target Sequence 8
aacctggaccagcacttccgc

SEQ ID NO: 218 - DNA, 21 bp, artificial sequence
  Sense Strand siRNA 8
ccuggaccagcacuuccgctt

SEQ ID NO: 219 - DNA, 21 bp, artificial sequence
  Antisense Strand siRNA 8
gcggaagugcugguccaggtt

SEQ ID NO: 220 - DNA, 21 bp, artificial sequence
  Target Sequence 9
aagcagagcctgccctacctg

SEQ ID NO: 221 - DNA, 21 bp, artificial sequence
  Sense Strand siRNA 9
gcagagccugcccuaccugtt

SEQ ID NO: 222 - DNA, 21 bp, artificial sequence
  Antisense Strand siRNA 9
cagguagggcaggcucugctt

SEQ ID NO: 223 - DNA, 21 bp, artificial sequence
  Target Sequence 10
aacttgctgttgcaggcccag

SEQ ID NO: 224 - DNA, 21 bp, artificial sequence
  Sense Strand siRNA 10
cuugcuguugcaggcccagtt

SEQ ID NO: 225 - DNA, 21 bp, artificial sequence
  Antisense Strand siRNA 10
cugggccugcaacagcaagtt

SEQ ID NO: 226 - DNA, 21 bp, artificial sequence
  Target Sequence 11
aagcccccggcttgggcctgg

SEQ ID NO: 227 - DNA, 21 bp, artificial sequence
  Sense Strand siRNA 11
gcccccggcuugggccuggtt

SEQ ID NO: 228 - DNA, 21 bp, artificial sequence
  Antisense Strand siRNA 11
ccaggcccaagccgggggctt

SEQ ID NO: 229 - DNA, 21 bp, artificial sequence
  Target Sequence 12
aacttgccccacattggcggt

SEQ ID NO: 230 - DNA, 21 bp, artificial sequence
  Sense Strand siRNA 12
cuugccccacauuggcggutt

SEQ ID NO: 231 - DNA, 21 bp, artificial sequence
  Antisense Strand siRNA 12
accgccaauguggggcaagtt

SEQ ID NO: 232 - DNA, 21 bp, artificial sequence
  Target Sequence 13
aagagcgttactcttggacca

SEQ ID NO: 233 - DNA, 21 bp, artificial sequence
  Sense Strand siRNA 13
gagcguuacucuuggaccatt

SEQ ID NO: 234 - DNA, 21 bp, artificial sequence
  Antisense Strand siRNA 13
ugguccaagaguaacgcuctt

SEQ ID NO: 235 - DNA, 21 bp, artificial sequence
  Target Sequence 14
aatgtttcctttgaccgagct

SEQ ID NO: 236 - DNA, 21 bp, artificial sequence
  Sense Strand siRNA 14
uguuuccuuugaccgagcutt

SEQ ID NO: 237 - DNA, 21 bp, artificial sequence
  Antisense Strand siRNA 14
agcucggucaaaggaaacatt

SEQ ID NO: 238 - DNA, 21 bp, artificial sequence
  Target Sequence 15
aagcagcttccagcgcagtct

SEQ ID NO: 239 - DNA, 21 bp, artificial sequence
  Sense Strand siRNA 15
gcagcuuccagcgcagucutt

SEQ ID NO: 240 - DNA, 21 bp, artificial sequence
  Antisense Strand siRNA 15
agacugcgcuggaagcugctt

SEQ ID NO: 241 - DNA, 21 bp, artificial sequence
  Target Sequence 16
aagcagggcaaacacaaggtc

SEQ ID NO: 242 - DNA, 21 bp, artificial sequence
  Sense Strand siRNA 16
gcagggcaaacacaagguctt

SEQ ID NO: 243 - DNA, 21 bp, artificial sequence
  Antisense Strand siRNA 16
gaccuuguguuugcccugctt

SEQ ID NO: 244 - DNA, 21 bp, artificial sequence
  Target Sequence 17
aaacacaaggtccagcccccc

SEQ ID NO: 245 - DNA, 21 bp, artificial sequence
  Sense Strand siRNA 17
acacaagguccagcccccctt

SEQ ID NO: 246 - DNA, 21 bp, artificial sequence
  Antisense Strand siRNA 17
ggggggcuggaccuugugutt

SEQ ID NO: 247 - DNA, 21 bp, artificial sequence
  Target Sequence 18
aaggtccagccccccacaaag

SEQ ID NO: 248 - DNA, 21 bp, artificial sequence
  Sense Strand siRNA 18
gguccagccccccacaaagtt

SEQ ID NO: 249 - DNA, 21 bp, artificial sequence
  Antisense Strand siRNA 18
cuuuguggggggcuggacctt

SEQ ID NO: 250 - DNA, 21 bp, artificial sequence
  Target Sequence 19
aaagcaaggccagaagtccca

SEQ ID NO: 251 - DNA, 21 bp, artificial sequence
  Sense Strand siRNA 19
agcaaggccagaagucccatt

SEQ ID NO: 252 - DNA, 21 bp, artificial sequence
  Antisense Strand siRNA 19
ugggacuucuggccuugcutt

SEQ ID NO: 253 - DNA, 21 bp, artificial sequence
  Target Sequence 20
aaggccagaagtcccagagga

SEQ ID NO: 254 - DNA, 21 bp, artificial sequence
  Sense Strand siRNA 20
ggccagaagucccagaggatt

SEQ ID NO: 255 - DNA, 21 bp, artificial sequence
  Antisense Strand siRNA 20
uccucugggacuucuggcctt

SEQ ID NO: 256 - DNA, 21 bp, artificial sequence
  Target Sequence 21
aagtcccagaggaaagccaga

SEQ ID NO: 257 - DNA, 21 bp, artificial sequence
  Sense Strand siRNA21
gucccagaggaaagccagatt

SEQ ID NO: 258 - DNA, 21 bp, artificial sequence
  Antisense Strand siRNA 21
ucuggcuuuccucugggactt

SEQ ID NO: 259 - DNA, 21 bp, artificial sequence
  Target Sequence 22
aaagccagaagaggcccagcg

SEQ ID NO: 260 - DNA, 21 bp, artificial sequence
  Sense Strand siRNA 22
agccagaagaggcccagcgtt

SEQ ID NO: 261 - DNA, 21 bp, artificial sequence
  Antisense Strand siRNA 22
cgcugggccucuucuggcutt

SEQ ID NO: 262 - DNA, 21 bp, artificial sequence
  Target Sequence 23
aagaggcccagcgatctcatc

SEQ ID NO: 263 - DNA, 21 bp, artificial sequence
  Sense Strand siRNA 23
gaggcccagcgaucucauctt

SEQ ID NO: 264 - DNA, 21 bp, artificial sequence
  Antisense Strand siRNA 23
gaugagaucgcugggccuctt

SEQ ID NO: 265 - DNA, 21 bp, artificial sequence
  Target Sequence 24
aacagtctggcagaggtgcac

SEQ ID NO: 266 - DNA, 21 bp, artificial sequence
  Sense Strand siRNA 24
cagucuggcagaggugcactt

SEQ ID NO: 267 - DNA, 21 bp, artificial sequence
  Antisense Strand siRNA 24
gugcaccucugccagacugtt

SEQ ID NO: 268 - DNA, 21 bp, artificial sequence
  Target Sequence 25
aaggagcctcgagaactgttt

SEQ ID NO: 269 - DNA, 21 bp, artificial sequence
  Sense Strand siRNA 25
ggagccucgagaacuguuutt

SEQ ID NO: 270 - DNA, 21 bp, artificial sequence
  Antisense Strand siRNA 25
aaacaguucucgaggcucctt

SEQ ID NO: 271 - DNA, 21 bp, artificial sequence
  Sense Strand siRNA 26
aactgtttgtgaagggcacca

SEQ ID NO: 272 - DNA, 21 bp, artificial sequence
  Sense Strand siRNA 26
cuguuugugaagggcaccatt

SEQ ID NO: 273 - DNA, 21 bp, artificial sequence
  Antisense Strand siRNA 26
uggugcccuucacaaacagtt

SEQ ID NO: 274 - DNA, 21 bp, artificial sequence
  Target Sequence 27
aagggcaccatgaaggacatt

SEQ ID NO: 275 - DNA, 21 bp, artificial sequence
  Sense Strand siRNA 27
gggcaccaugaaggacauutt

SEQ ID NO: 276 - DNA, 21 bp, artificial sequence
  Antisense Strand siRNA 27
aauguccuucauggugccctt

SEQ ID NO: 277 - DNA, 21 bp, artificial sequence
  Target Sequence 28
aaggacattcgtgagaacttc

SEQ ID NO: 278 - DNA, 21 bp, artificial sequence
  Sense Strand siRNA 28
ggacauucgugagaacuuctt

SEQ ID NO: 279 - DNA, 21 bp, artificial sequence
  Antisense Strand siRNA 28
gaaguucucacgaaugucctt

SEQ ID NO: 280 - DNA, 21 bp, artificial sequence
  Target Sequence 29
aacttccaggacctgatgcag

SEQ ID NO: 281 - DNA, 21 bp, artificial sequence
  Sense Strand siRNA 29
cuuccaggaccugaugcagtt

SEQ ID NO: 282 - DNA, 21 bp, artificial sequence
  Antisense Strand siRNA 29
cugcaucagguccuggaagtt

SEQ ID NO: 283 - DNA, 21 bp, artificial sequence
  Target Sequence 30
aaccagaactgggagcgttac

SEQ ID NO: 284 - DNA, 21 bp, artificial sequence
  Sense Strand siRNA 30
ccagaacugggagcguuactt

SEQ ID NO: 285 - DNA, 21 bp, artificial sequence
  Antisense Strand siRNA 30
guaacgcucccaguucuggtt

SEQ ID NO: 286 - DNA, 21 bp, artificial sequence
  Target Sequence 31
aactgggagcgttacctggca

SEQ ID NO: 287 - DNA, 21 bp, artificial sequence
  Sense Strand siRNA 31
cugggagcguuaccuggcatt

SEQ ID NO: 288 - DNA, 21 bp, artificial sequence
  Antisense Strand siRNA 31
ugccagguaacgcucccagtt

SEQ ID NO: 289 - DNA, 21 bp, artificial sequence
  Target Sequence 32
aagaagtcgttgatggatctg

SEQ ID NO: 290 - DNA, 21 bp, artificial sequence
  Sense Strand siRNA 32
gaagucguugauggaucugtt

SEQ ID NO: 291 - DNA, 21 bp, artificial sequence
  Antisense Strand siRNA 32
cagauccaucaacgacuuctt

SEQ ID NO: 292 - DNA, 21 bp, artificial sequence
  Target Sequence 33
aagtcgttgatggatctggcc

SEQ ID NO: 293 - DNA, 21 bp, artificial sequence
  Sense Strand siRNA 33
gucguugauggaucuggcctt

SEQ ID NO: 294 - DNA, 21 bp, artificial sequence
  Antisense Strand siRNA 33
ggccagauccaucaacgactt

SEQ ID NO: 295 - DNA, 21 bp, artificial sequence
  Target Sequence 34
aatgatgcctgccagctgctc

SEQ ID NO: 296 - DNA, 21 bp, artificial sequence
  Sense Strand siRNA 34
ugaugccugccagcugcuctt

SEQ ID NO: 297 - DNA, 21 bp, artificial sequence
  Antisense Strand siRNA 34
gagcagcuggcaggcaucatt

SEQ ID NO: 298 - DNA, 21 bp, artificial sequence
  Target Sequence 35
aaagaagacccctggctctgg

SEQ ID NO: 299 - DNA, 21 bp, artificial sequence
  Sense Strand siRNA 35
agaagaccccuggcucuggtt

SEQ ID NO: 300 - DNA, 21 bp, artificial sequence
  Antisense Strand siRNA 35
ccagagccaggggucuucutt

SEQ ID NO: 301 - DNA, 21 bp, artificial sequence
  Target Sequence 36
aagacccctggctctgggacc

SEQ ID NO: 302 - DNA, 21 bp, artificial sequence
  Sense Strand siRNA 36
gaccccuggcucugggacctt

SEQ ID NO: 303 - DNA, 21 bp, artificial sequence
  Antisense Strand siRNA 36
ggucccagagccagggguctt

SEQ ID NO: 304 - DNA, 21 bp, artificial sequence
  Target Sequence 37
aagaatttaagcagaagaaag

SEQ ID NO: 305 - DNA, 21 bp, artificial sequence
  Sense Strand siRNA 37
gaauuuaagcagaagaaagtt

SEQ ID NO: 306 - DNA, 21 bp, artificial sequence
  Antisense Strand siRNA 38
cuuucuucugcuuaaauuctt

SEQ ID NO: 307 - DNA, 21 bp, artificial sequence
  Target Sequence 38
aatttaagcagaagaaagcta

SEQ ID NO: 308 - DNA, 21 bp, artificial sequence
  Sense Strand siRNA 38
uuuaagcagaagaaagcuatt

SEQ ID NO: 309 - DNA, 21 bp, artificial sequence
  Antisense Strand siRNA 38
uagcuuucuucugcuuaaatt

SEQ ID NO: 310 - DNA, 21 bp, artificial sequence
  Target Sequence 39
aagcagaagaaagctaagaag

SEQ ID NO: 311 - DNA, 21 bp, artificial sequence
  Sense Strand siRNA 39
gcagaagaaagcuaagaagtt

SEQ ID NO: 312 - DNA, 21 bp, artificial sequence
  Antisense Strand siRNA 39
cuucuuagcuuucuucugctt

SEQ ID NO: 313 - DNA, 21 bp, artificial sequence
  Target Sequence 40
aagaaagctaagaaggtgaag

SEQ ID NO: 314 - DNA, 21 bp, artificial sequence
  Sense Strand siRNA 40
gaaagcuaagaaggugaagtt

SEQ ID NO: 315 - DNA, 21 bp, artificial sequence
  Antisense Strand siRNA 40
cuucaccuucuuagcuuuctt

SEQ ID NO: 316 - DNA, 21 bp, artificial sequence
  Target Sequence 41
aaagctaagaaggtgaagaag

SEQ ID NO: 317 - DNA, 21 bp, artificial sequence
  Sense Strand siRNA 41
agcuaagaaggugaagaagtt

SEQ ID NO: 318 - DNA, 21 bp, artificial sequence
  Antisense Strand siRNA 41
cuucuucaccuucuuagcutt

SEQ ID NO: 319 - DNA, 21 bp, artificial sequence
  Target Sequence 42
aagaaggtgaagaaggaacca

SEQ ID NO: 320 - DNA, 21 bp, artificial sequence
  Sense Strand siRNA 42
gaaggugaagaaggaaccatt

SEQ ID NO: 321 - DNA, 21 bp, artificial sequence
  Antisense Strand siRNA 42
ugguuccuucuucaccuuctt

SEQ ID NO: 322 - DNA, 21 bp, artificial sequence
  Target Sequence 43
aaggtgaagaaggaaccagcc

SEQ ID NO: 323 - DNA, 21 bp, artificial sequence
  Sense Strand siRNA 43
ggugaagaaggaaccagcctt

SEQ ID NO: 324 - DNA, 21 bp, artificial sequence
  Antisense Strand siRNA 43
ggcugguuccuucuucacctt

SEQ ID NO: 325 - DNA, 21 bp, artificial sequence
  Target Sequence 44
aagaaggaaccagccacagcc

SEQ ID NO: 326 - DNA, 21 bp, artificial sequence
  Sense Strand siRNA 44
gaaggaaccagccacagcctt

SEQ ID NO: 327 - DNA, 21 bp, artificial sequence
  Antisense Strand siRNA 44
ggcuguggcugguuccuuctt

SEQ ID NO: 328 - DNA, 21 bp, artificial sequence
  Target Sequence 45
aaggaaccagccacagccagc

SEQ ID NO: 329 - DNA, 21 bp, artificial sequence
  Sense Strand siRNA 45
ggaaccagccacagccagctt

SEQ ID NO: 330 - DNA, 21 bp, artificial sequence
  Antisense Strand siRNA 45
gcuggcuguggcugguucctt

SEQ ID NO: 331 - DNA, 21 bp, artificial sequence
  Target Sequence 46
aaccagccacagccagcaagt

SEQ ID NO: 332 - DNA, 21 bp, artificial sequence
  Sense Strand siRNA 46
ccagccacagccagcaagutt

SEQ ID NO: 333 - DNA, 21 bp, artificial sequence
  Antisense Strand siRNA 46
acuugcuggcuguggcuggtt

SEQ ID NO: 334 - DNA, 21 bp, artificial sequence
  Target Sequence 47
aagttgcccatcgagggggct

SEQ ID NO: 335 - DNA, 21 bp, artificial sequence
  Sense Strand siRNA 47
guugcccaucgagggggcutt

SEQ ID NO: 336 - DNA, 21 bp, artificial sequence
  Antisense Strand siRNA 47
agcccccucgaugggcaactt

SEQ ID NO: 337 - DNA, 21 bp, artificial sequence
  Target Sequence 48
aagacctcggcccctgcagtg

SEQ ID NO: 338 - DNA, 21 bp, artificial sequence
  Sense Strand siRNA 48
gaccucggccccugcagugtt

SEQ ID NO: 339 - DNA, 21 bp, artificial sequence
  Antisense Strand siRNA 48
cacugcaggggccgagguctt

SEQ ID NO: 340 - DNA, 21 bp, artificial sequence
  Target Sequence 49
aacaagatgtcatggcccgcg

SEQ ID NO: 341 - DNA, 21 bp, artificial sequence
  Sense Strand siRNA 49
caagaugucauggcccgcgtt

SEQ ID NO: 342 - DNA, 21 bp, artificial sequence
  Antisense Strand siRNA 49
cgcgggccaugacaucuugtt

SEQ ID NO: 343 - DNA, 21 bp, artificial sequence
  Target Sequence 50
aagatgtcatggcccgcgcct

SEQ ID NO: 344 - DNA, 21 bp, artificial sequence
  Sense Strand siRNA 50
gaugucauggcccgcgccutt

SEQ ID NO: 345 - DNA, 21 bp, artificial sequence
  Antisense Strand siRNA 50
aggcgcgggccaugacauctt

SEQ ID NO: 346 - DNA, 21 bp, artificial sequence
  Target Sequence 51
aagctgaaggggaccacagag

SEQ ID NO: 347 - DNA, 21 bp, artificial sequence
  Sense Strand siRNA 51
gcugaaggggaccacagagtt

SEQ ID NO: 348 - DNA, 21 bp, artificial sequence
  Antisense Strand siRNA 51
cucugugguccccuucagctt

SEQ ID NO: 349 - DNA, 21 bp, artificial sequence
  Target Sequence 52
aaggggaccacagagctcctg

SEQ ID NO: 350 - DNA, 21 bp, artificial sequence
  Sense Strand siRNA 52
ggggaccacagagcuccugtt

SEQ ID NO: 351 - DNA, 21 bp, artificial sequence
  Antisense Strand siRNA 52
caggagcucuguggucccctt

SEQ ID NO: 352 - DNA, 21 bp, artificial sequence
  Target Sequence 53
aagcggccccagcaccttcct

SEQ ID NO: 353 - DNA, 21 bp, artificial sequence
  Sense Strand siRNA 53
gcggccccagcaccuuccutt

SEQ ID NO: 354 - DNA, 21 bp, artificial sequence
  Antisense Strand siRNA 53
aggaaggugcuggggccgctt

SEQ ID NO: 355 - DNA, 21 bp, artificial sequence
  Target Sequence 54
aagctctgcccccggctagac

SEQ ID NO: 356 - DNA, 21 bp, artificial sequence
  Sense Strand siRNA 54
gcucugcccccggcuagactt

SEQ ID NO: 357 - DNA, 21 bp, artificial sequence
  Antisense Strand siRNA 54
gucuagccgggggcagagctt

SEQ ID NO: 358 - DNA, 21 bp, artificial sequence
  Target Sequence 55
aaactcatggcacttacctgg

SEQ ID NO: 359 - DNA, 21 bp, artificial sequence
  Sense Strand siRNA 55
acucauggcacuuaccuggtt

SEQ ID NO: 360 - DNA, 21 bp, artificial sequence
  Antisense Strand siRNA 55
ccagguaagugccaugagutt

SEQ ID NO: 361 - DNA, 21 bp, artificial sequence
  Target Sequence 56
aacctggccaagctgccgaca

SEQ ID NO: 362 - DNA, 21 bp, artificial sequence
  Sense Strand siRNA 56
ccuggccaagcugccgacatt

SEQ ID NO: 363 - DNA, 21 bp, artificial sequence
  Antisense Strand siRNA 56
ugucggcagcuuggccaggtt

SEQ ID NO: 364 - DNA, 21 bp, artificial sequence
  Target Sequence 57
aagctgccgacaggtaccacc

SEQ ID NO: 365 - DNA, 21 bp, artificial sequence
  Sense Strand siRNA 57
gcugccgacagguaccacctt

SEQ ID NO: 366 - DNA, 21 bp, artificial sequence
  Antisense Strand siRNA 57
ggugguaccugucggcagctt

SEQ ID NO: 367 - DNA, 21 bp, artificial sequence
  Target Sequence 58
aagcactgtctcgaacagggg

SEQ ID NO: 368 - DNA, 21 bp, artificial sequence
  Sense Strand siRNA 58
gcacugucucgaacaggggtt

SEQ ID NO: 369 - DNA, 21 bp, artificial sequence
  Antisense Strand siRNA 58
ccccuguucgagacagugctt

SEQ ID NO: 370 - DNA, 21 bp, artificial sequence
  Target Sequence 59
aacaggggaagcagcagctga

SEQ ID NO: 371 - DNA, 21 bp, artificial sequence
  Sense Strand siRNA 59
caggggaagcagcagcugatt

SEQ ID NO: 372 - DNA, 21 bp, artificial sequence
  Antisense Strand siRNA 59
ucagcugcugcuuccccugtt

SEQ ID NO: 373 - DNA, 21 bp, artificial sequence
  Target Sequence 60
aagcagcagctgatgccccag

SEQ ID NO: 374 - DNA, 21 bp, artificial sequence
  Sense Strand siRNA 60
gcagcagcugaugccccagtt

SEQ ID NO: 375 - DNA, 21 bp, artificial sequence
  Antisense Strand siRNA 60
cuggggcaucagcugcugctt

SEQ ID NO: 376 - DNA, 21 bp, artificial sequence
  Target Sequence 61
aatagtgccatatggcaaacg

SEQ ID NO: 377 - DNA, 21 bp, artificial sequence
  Sense Strand siRNA 61
uagugccauauggcaaacgtt

SEQ ID NO: 378 - DNA, 21 bp, artificial sequence
  Antisense Strand siRNA 61
cguuugccauauggcacuatt

SEQ ID NO: 379 - DNA, 21 bp, artificial sequence
  Target Sequence 92
aaacggtagaagaactggatt

SEQ ID NO: 380 - DNA, 21 bp, artificial sequence
  Sense Strand siRNA 62
acgguagaagaacuggauutt

SEQ ID NO: 381 - DNA, 21 bp, artificial sequence
  Antisense Strand siRNA 62
aauccaguucuucuaccgutt

SEQ ID NO: 382 - DNA, 21 bp, artificial sequence
  Target Sequence 63
aagaactggattacttagaag

SEQ ID NO: 383 - DNA, 21 bp, artificial sequence
  Sense Strand siRNA 63
gaacuggauuacuuagaagtt

SEQ ID NO: 384 - DNA, 21 bp, artificial sequence
  Antisense Strand 63
cuucuaaguaauccaguuctt

SEQ ID NO: 385 - DNA, 21 bp, artificial sequence
  Target Sequence 64
aactggattacttagaagtgg

SEQ ID NO: 386 - DNA, 21 bp, artificial sequence
  Sense Strand siRNA 64
cuggauuacuuagaaguggtt

SEQ ID NO: 387 - DNA, 21 bp, artificial sequence
  Antisense Strand siRNA 64
ccacuucuaaguaauccagtt

SEQ ID NO: 388 - DNA, 21 bp, artificial sequence
  Target Sequence 65
aagtggaggctgaggccaaga

SEQ ID NO: 389 - DNA, 21 bp, artificial sequence
  Sense Strand siRNA 65
guggaggcugaggccaagatt

SEQ ID NO: 390 - DNA, 21 bp, artificial sequence
  Antisense Strand siRNA 65
ucuuggccucagccuccactt

SEQ ID NO: 391 - DNA, 21 bp, artificial sequence
  Target Sequence 66
aagatggagaacttgcgagct

SEQ ID NO: 392 - DNA, 21 bp, artificial sequence
  Sense Strand siRNA 66
gauggagaacuugcgagcutt

SEQ ID NO: 393 - DNA, 21 bp, artificial sequence
  Antisense Strand siRNA 66
agcucgcaaguucuccauctt

SEQ ID NO: 394 - DNA, 21 bp, artificial sequence
  Target Sequence 67
aacttgcgagctgcagtgcca

SEQ ID NO: 395 - DNA, 21 bp, artificial sequence
  Sense Strand siRNA 67
cuugcgagcugcagugccatt

SEQ ID NO: 396 - DNA, 21 bp, artificial sequence
  Antisense Strand siRNA 67
uggcacugcagcucgcaagtt

SEQ ID NO: 397 - DNA, 21 bp, artificial sequence
  Target Sequence 68
aacccctagctctgactgccc

SEQ ID NO: 398 - DNA, 21 bp, artificial sequence
  Sense Strand siRNA 68
ccccuagcucugacugccctt

SEQ ID NO: 399 - DNA, 21 bp, artificial sequence
  Antisense Strand siRNA 68
gggcagucagagcuaggggtt

SEQ ID NO: 400 - DNA, 21 bp, artificial sequence
  Target Sequence 69
aaggacacccagcccagctat

SEQ ID NO: 401 - DNA, 21 bp, artificial sequence
  Sense Strand siRNA 69
ggacacccagcccagcuautt

SEQ ID NO: 402 - DNA, 21 bp, artificial sequence
  Antisense Strand siRNA 69
auagcugggcugggugucctt

SEQ ID NO: 403 - DNA, 21 bp, artificial sequence
  Target Sequence 70
aatggaccttacaacgacgtg

SEQ ID NO: 404 - DNA, 21 bp, artificial sequence
  Sense Strand siRNA 70
uggaccuuacaacgacgugtt

SEQ ID NO: 405 - DNA, 21 bp, artificial sequence
  Antisense Strand siRNA 70
cacgucguuguaagguccatt

SEQ ID NO: 406 - DNA, 21 bp, artificial sequence
  Target Sequence 71
aacgacgtggacatccctggc

SEQ ID NO: 407 - DNA, 21 bp, artificial sequence
  Sense Strand siRNA 71
cgacguggacaucccuggctt

SEQ ID NO: 408 - DNA, 21 bp, artificial sequence
  Antisense Strand siRNA 71
gccagggauguccacgucgtt

SEQ ID NO: 409 - DNA, 21 bp, artificial sequence
  Target Sequence 72
aagctgcctcacaaggatggt

SEQ ID NO: 410 - DNA, 21 bp, artificial sequence
  Sense Strand siRNA 72
gcugccucacaaggauggutt

SEQ ID NO: 411 - DNA, 21 bp, artificial sequence
  Antisense Strand siRNA 72
accauccuugugaggcagctt

SEQ ID NO: 412 - DNA, 21 bp, artificial sequence
  Target Sequence 73
aaggatggtaatagctgtaat

SEQ ID NO: 413 - DNA, 21 bp, artificial sequence
  Sense Strand siRNA 73
ggaugguaauagcuguaautt

SEQ ID NO: 414 - DNA, 21 bp, artificial sequence
  Antisense Strand siRNA 74
auuacagcuauuaccaucctt

SEQ ID NO: 415 - DNA, 21 bp, artificial sequence
  Target Sequence 74
aatagctgtaatgtgggaagc

SEQ ID NO: 416 - DNA, 21 bp, artificial sequence
  Sense Strand siRNA 74
uagcuguaaugugggaagctt

SEQ ID NO: 417 - DNA, 21 bp, artificial sequence
  Antisense Strand siRNA 74
gcuucccacauuacagcuatt

SEQ ID NO: 418 - DNA, 21 bp, artificial sequence
  Target Sequence 75
aatgtgggaagcccctttgcc

SEQ ID NO: 419 - DNA, 21 bp, artificial sequence
  Sense Strand siRNA 75
ugugggaagccccuuugcctt

SEQ ID NO: 420 - DNA, 21 bp, artificial sequence
  Antisense Strand siRNA 75
ggcaaaggggcuucccacatt

SEQ ID NO: 421 - DNA, 21 bp, artificial sequence
  Target Sequence 76
aagcccctttgccaaggactt

SEQ ID NO: 422 - DNA, 21 bp, artificial sequence
  Sense Strand siRNA 76
gccccuuugccaaggacuutt

SEQ ID NO: 423 - DNA, 21 bp, artificial sequence
  Antisense Strand siRNA 76
aaguccuuggcaaaggggctt

SEQ ID NO: 424 - DNA, 21 bp, artificial sequence
  Target Sequence 77
aaggacttcctgcccaagatg

SEQ ID NO: 425 - DNA, 21 bp, artificial sequence
  Sense Strand siRNA 77
ggacuuccugcccaagaugtt

SEQ ID NO: 426 - DNA, 21 bp, artificial sequence
  Antisense Strand siRNA 77
caucuugggcaggaagucctt

SEQ ID NO: 427 - DNA, 21 bp, artificial sequence
  Target Sequence 78
aagatggaggatggcaccctg

SEQ ID NO: 428 - DNA, 21 bp, artificial sequence
  Sense Strand siRNA 78
gauggaggauggcacccugtt

SEQ ID NO: 429 - DNA, 21 bp, artificial sequence
  Antisense Strand siRNA 78
cagggugccauccuccauctt

SEQ ID NO: 430 - DNA, 21 bp, artificial sequence
  Target Sequence 79
aaatcaacaaaatgatttctt

SEQ ID NO: 431 - DNA, 21 bp, artificial sequence
  Sense Strand siRNA 79
aucaacaaaaugauuucuutt

SEQ ID NO: 432 - DNA, 21 bp, artificial sequence
  Antisense Strand siRNA 79
aagaaaucauuuuguugautt

SEQ ID NO: 433 - DNA, 21 bp, artificial sequence
  Target Sequence 80
aacaaaatgatttctttctgg

SEQ ID NO: 434 - DNA, 21 bp, artificial sequence
  Sense Strand siRNA 80
caaaaugauuucuuucuggtt

SEQ ID NO: 435 - DNA, 21 bp, artificial sequence
  Antisense Strand siRNA 80
ccagaaagaaaucauuuugtt

SEQ ID NO: 436 - DNA, 21 bp, artificial sequence
  Target Sequence 81
aaaatgatttctttctggagg

SEQ ID NO: 437 - DNA, 21 bp, Artificial Sequence
  Sense Strand siRNA 81
aaugauuucuuucuggaggtt

SEQ ID NO: 438 - DNA, 21 bp, artificial sequence
  Antisense Strand siRNA 81
ccuccagaaagaaaucauutt

SEQ ID NO: 439 - DNA, 21 bp, artificial sequence
  Target Sequence 82
aatgatttctttctggaggaa

SEQ ID NO: 440 - DNA, 21 bp, artificial sequence
  Sense Strand siRNA 82
ugauuucuuucuggaggaatt

SEQ ID NO: 441 - DNA, 21 bp, artificial sequence
  Antisense Strand siRNA 82
uuccuccagaaagaaaucatt

SEQ ID NO: 442 - DNA, 21 bp, artificial sequence
  Target Sequence 83
aacgcccataaacgtatcagc

SEQ ID NO: 443 - DNA, 21 bp, artificial sequence
  Sense Strand siRNA 83
cgcccauaaacguaucagctt

SEQ ID NO: 444 - DNA, 21 bp, artificial sequence
  Antisense Strand siRNA 83
gcugauacguuuaugggcgtt

SEQ ID NO: 445 - DNA, 21 bp, artificial sequence
  Target Sequence 84
aaacgtatcagctcccagatg

SEQ ID NO: 446 - DNA, 21 bp, artificial sequence
  Sense Strand siRNA 84
acguaucagcucccagaugtt

SEQ ID NO: 447 - DNA, 21 bp, artificial sequence
  Antisense Strand siRNA 84
caucugggagcugauacgutt

SEQ ID NO: 448 - DNA, 21 bp, artificial sequence
  Target Sequence 85
aaggcctctatggggccatcc

SEQ ID NO: 449 - DNA, 21 bp, artificial sequence
  Sense Strand siRNA 85
ggccucuauggggccaucctt

SEQ ID NO: 450 - DNA, 21 bp, artificial sequence
  Antisense Strand siRNA 85
ggauggccccauagaggcctt

SEQ ID NO: 451 - DNA, 21 bp, artificial sequence
  Target Sequence 86
aagtggtgactgccggcacca

SEQ ID NO: 452 - DNA, 21 bp, artificial sequence
  Sense Strand siRNA86
guggugacugccggcaccatt

SEQ ID NO: 453 - DNA, 21 bp, artificial sequence
  Antisense Strand siRNA 86
uggugccggcagucaccactt

SEQ ID NO: 454 - DNA, 21 bp, artificial sequence
  Target Sequence 87
aatgcccggcctgaccgagta

SEQ ID NO: 455 - DNA, 21 bp, artificial sequence
  Sense Strand siRNA 87
ugcccggccugaccgaguatt

SEQ ID NO: 456 - DNA, 21 bp, artificial sequence
  Antisense Strand siRNA 87
uacucggucaggccgggcatt

SEQ ID NO: 457 - DNA, 21 bp, artificial sequence
  Target Sequence 88
aaagccatggtgcaggcccca

SEQ ID NO: 458 - DNA, 21 bp, artificial sequence
  Sense Strand siRNA 88
agccauggugcaggccccatt

SEQ ID NO: 459 - DNA, 21 bp, artificial sequence
  Antisense Strand siRNA 88
uggggccugcaccauggcutt

SEQ ID NO: 460 - DNA, 21 bp, artificial sequence
  Target Sequence 89
aagagctgtggattgcagctg

SEQ ID NO: 461 - DNA, 21 bp, artificial sequence
  Sense Strand siRNA 89
gagcuguggauugcagcugtt

SEQ ID NO: 462 - DNA, 21 bp, artificial sequence
  Antisense Strand siRNA 89
cagcugcaauccacagcuctt

SEQ ID NO: 463 - DNA, 21 bp, artificial sequence
  Target Sequence 90
aagagcaggggcactgatcta

SEQ ID NO: 464 - DNA, 21 bp, artificial sequence
  Sense Strand siRNA 90
gagcaggggcacugaucuatt

SEQ ID NO: 465 - DNA, 21 bp, artificial sequence
  Antisense Strand siRNA 90
uagaucagugccccugcuctt

SEQ ID NO: 466 - DNA, 21 bp, artificial sequence
  Target Sequence 91
aagacagccactactgtgggc

SEQ ID NO: 467 - DNA, 21 bp, artificial sequence
  Sense Strand siRNA 91
gacagccacuacugugggctt

SEQ ID NO: 468 - DNA, 21 bp, artificial sequence
  Antisense Strand siRNA 91
gcccacaguaguggcuguctt

SEQ ID NO: 469 - DNA, 21 bp, artificial sequence
  Target Sequence 92
aaaatcttcaactacggccgc

SEQ ID NO: 470 - DNA, 21 bp, artificial sequence
  Sense Strand siRNA 92
aaucuucaacuacggccgctt

SEQ ID NO: 471 - DNA, 21 bp, artificial sequence
  Antisense Strand siRNA 92
gcggccguaguugaagauutt

SEQ ID NO: 472 - DNA, 21 bp, artificial sequence
  Target Sequence 93
aatcttcaactacggccgcat

SEQ ID NO: 473 - DNA, 21 bp, artificial sequence
  Sense Strand siRNA 93
ucuucaacuacggccgcautt

SEQ ID NO: 474 - DNA, 21 bp, artificial sequence
  Antisense Strand siRNA 93
augcggccguaguugaagatt

SEQ ID NO: 475 - DNA, 21 bp, artificial sequence
  Target Sequence 94
aactacggccgcatctatggt

SEQ ID NO: 476 - DNA, 21 bp, artificial sequence
  Sense Strand siRNA94
cuacggccgcaucuauggutt

SEQ ID NO: 477 - DNA, 21 bp, artificial sequence
  Antisense Strand siRNA 94
accauagaugcggccguagtt

SEQ ID NO: 478 - DNA, 21 bp, artificial sequence
  Target Sequence 95
aatgcagtttaaccaccggct

SEQ ID NO: 479 - DNA, 21 bp, artificial sequence
  Sense Strand siRNA 95
ugcaguuuaaccaccggcutt

SEQ ID NO: 480 - DNA, 21 bp, artificial sequence
  Antisense Strand siRNA 95
agccggugguuaaacugcatt

SEQ ID NO: 481 - DNA, 21 bp, artificial sequence
  Target Sequence 96
aaccaccggctcacacagcag

SEQ ID NO: 482 - DNA, 21 bp, artificial sequence
  Sense Strand siRNA 96
ccaccggcucacacagcagtt

SEQ ID NO: 483 - DNA, 21 bp, artificial sequence
  Antisense Strand siRNA 96
cugcugugugagccgguggtt

SEQ ID NO: 484 - DNA, 21 bp, artificial sequence
  Target Sequence 97
aaggcccagcagatgtacgct

SEQ ID NO: 485 - DNA, 21 bp, artificial sequence
  Sense Strand siRNA 97
ggcccagcagauguacgcutt

SEQ ID NO: 486 - DNA, 21 bp, artificial sequence
  Antisense Strand siRNA 97
agcguacaucugcugggcctt

SEQ ID NO: 487 - DNA, 21 bp, artificial sequence
  Target Sequence 98
aagggcctccgctggtatcgg

SEQ ID NO: 488 - DNA, 21 bp, artificial sequence
  Sense Strand siRNA 98
gggccuccgcugguaucggtt

SEQ ID NO: 489 - DNA, 21 bp, artificial sequence
  Antisense Strand siRNA 98
ccgauaccagcggaggccctt

SEQ ID NO: 490 - DNA, 21 bp, artificial sequence
  Target Sequence 99
aacctcccagtggacaggact

SEQ ID NO: 491 - DNA, 21 bp, artificial sequence
  Sense Strand siRNA 99
ccucccaguggacaggacutt

SEQ ID NO: 492 - DNA, 21 bp, artificial sequence
  Antisense Strand siRNA 99
aguccuguccacugggaggtt

SEQ ID NO: 493 - DNA, 21 bp, artificial sequence
  Target Sequence 100
aaggtccagagagaaactgca

SEQ ID NO: 494 - DNA, 21 bp, artificial sequence
  Sense Strand siRNA 100
gguccagagagaaacugcatt

SEQ ID NO: 495 - DNA, 21 bp, artificial sequence
  Antisense Strand siRNA 100
ugcaguuucucucuggacctt

SEQ ID NO: 496 - DNA, 21 bp, artificial sequence
  Target Sequence 101
aaactgcaaggaagtcacagt

SEQ ID NO: 497 - DNA, 21 bp, artificial sequence
  Sense Strand siRNA 101
acugcaaggaagucacagutt

SEQ ID NO: 498 - DNA, 21 bp, artificial sequence
  Antisense Strand siRNA 101
acugugacuuccuugcagutt

SEQ ID NO: 499 - DNA, 21 bp, artificial sequence
  Target Sequence 102
aaggaagtcacagtggaagaa

SEQ ID NO: 500 - DNA, 21 bp, artificial sequence
  Sense Strand siRNA 102
ggaagucacaguggaagaatt

SEQ ID NO: 501 - DNA, 21 bp, artificial sequence
  Antisense Strand siRNA 102
uucuuccacugugacuucctt

SEQ ID NO: 502 - DNA, 21 bp, artificial sequence
  Target Sequence 103
aagtcacagtggaagaagtgg

SEQ ID NO: 503 - DNA, 21 bp, artificial sequence
  Sense Strand siRNA 103
gucacaguggaagaaguggtt

SEQ ID NO: 504 - DNA, 21 bp, artificial sequence
  Antisense Strans siRNA 103
ccacuucuuccacugugactt

SEQ ID NO: 505 - DNA, 21 bp, artificial sequence
  Target Sequence 104
aagaagtgggaggtggttgct

SEQ ID NO: 506 - DNA, 21 bp, artificial sequence
  Sense Strand siRNA 104
gaagugggaggugguugcutt

SEQ ID NO: 507 - DNA, 21 bp, artificial sequence
  Antisense Strand siRNA 104
agcaaccaccucccacuuctt

SEQ ID NO: 508 - DNA, 21 bp, artificial sequence
  Target Sequence 105
aagtgggaggtggttgctgaa

SEQ ID NO: 509 - DNA, 21 bp, artificial sequence
  Sense Strand siRNA 105
gugggaggugguugcugaatt

SEQ ID NO: 510 - DNA, 21 bp, artificial sequence
  Antisense Strand siRNA 105
uucagcaaccaccucccactt

SEQ ID NO: 511 - DNA, 21 bp, artificial sequence
  Target Sequence 106
aacgggcatggaaggggggca

SEQ ID NO: 512 - DNA, 21 bp, artificial sequence
  Sense Strand siRNA 106
cgggcauggaaggggggcatt

SEQ ID NO: 513 - DNA, 21 bp, artificial sequence
  Antisense Strand siRNA 106
ugccccccuuccaugcccgtt

SEQ ID NO: 514 - DNA, 21 bp, artificial sequence
  Target Sequence 107
aaggggggcacagagtcagaa

SEQ ID NO: 515 - DNA, 21 bp, artificial sequence
  Sense Strand siRNA 107
ggggggcacagagucagaatt

SEQ ID NO: 516 - DNA, 21 bp, artificial sequence
  Antisense Strand siRNA 107
uucugacucugugcccccctt

SEQ ID NO: 517 - DNA, 21 bp, artificial sequence
  Target Sequence 108
aaatgttcaataagcttgaga

SEQ ID NO: 518 - DNA, 21 bp, artificial sequence
  Sense Strand siRNA 108
auguucaauaagcuugagatt

SEQ ID NO: 519 - DNA, 21 bp, artificial sequence
  Antisense Strand siRNA 108
ucucaagcuuauugaacautt

SEQ ID NO: 520 - DNA, 21 bp, artificial sequence
  Target Sequence 109
aataagcttgagagcattgct

SEQ ID NO: 521 - DNA, 21 bp, artificial sequence
  Sense Strand siRNA 109
uaagcuugagagcauugcutt

SEQ ID NO: 522 - DNA, 21 bp, artificial sequence
  Antisense Strand siRNA 109
agcaaugcucucaagcuuatt

SEQ ID NO: 523 - DNA, 21 bp, artificial sequence
  Target Sequence 110
aagcttgagagcattgctacg

SEQ ID NO: 524 - DNA, 21 bp, artificial sequence
  Sense Strand siRNA 110
gcuugagagcauugcuacgtt

SEQ ID NO: 525 - DNA, 21 bp, artificial sequence
  Antisense Strand siRNA 110
cguagcaaugcucucaagctt

SEQ ID NO: 526 - DNA, 21 bp, artificial sequence
  Target Sequence 111
aagagtttatgaccagccgtg

SEQ ID NO: 527 - DNA, 21 bp, artificial sequence
  Sense Strand siRNA 111
gaguuuaugaccagccgugtt

SEQ ID NO: 528 - DNA, 21 bp, artificial sequence
  Antisense Strand siRNA 111
cacggcuggucauaaacuctt

SEQ ID NO: 529 - DNA, 21 bp, artificial sequence
  Target Sequence 112
aattgggtggtacagagctct

SEQ ID NO: 530 - DNA, 21 bp, artificial sequence
  Sense Strand siRNA 112
uugggugguacagagcucutt

SEQ ID NO: 531 - DNA, 21 bp, artificial sequence
  Antisense Strand siRNA 112
agagcucuguaccacccaatt

SEQ ID NO: 532 - DNA, 21 bp, artificial sequence
  Target Sequence 113
aagtggctgtttgaagagttt

SEQ ID NO: 533 - DNA, 21 bp, artificial sequence
  Sense Strand siRNA 113
guggcuguuugaagaguuutt

SEQ ID NO: 534 - DNA, 21 bp, artificial sequence
  Antisense Strand siRNA 113
aaacucuucaaacagccactt

SEQ ID NO: 535 - DNA, 21 bp, artificial sequence
  Target Sequence 114
aagagtttgccatagatgggc

SEQ ID NO: 536 - DNA, 21 bp, artificial sequence
  Sense Strand siRNA 114
gaguuugccauagaugggctt

SEQ ID NO: 537 - DNA, 21 bp, artificial sequence
  Antisense Strand siRNA 114
gcccaucuauggcaaacuctt

SEQ ID NO: 538 - DNA, 21 bp, artificial sequence
  Target Sequence 115
aacctcttgaccaggtgcatg

SEQ ID NO: 539 - DNA, 21 bp, artificial sequence
  Sense Strand siRNA 115
ccucuugaccaggugcaugtt

SEQ ID NO: 540 - DNA, 21 bp, artificial sequence
  Antisense Strand siRNA 115
caugcaccuggucaagaggtt

SEQ ID NO: 541 - DNA, 21 bp, artificial sequence
  Target Sequence 116
aagctgggtctgaatgacttg

SEQ ID NO: 542 - DNA, 21 bp, artificial sequence
  Sense Strand siRNA 116
gcugggucugaaugacuugtt

SEQ ID NO: 543 - DNA, 21 bp, artificial sequence
  Antisense Strand siRNA 116
caagucauucagacccagctt

SEQ ID NO: 544 - DNA, 21 bp, artificial sequence
  Target Sequence 117
aatgacttgccccagtcagtc

SEQ ID NO: 545 - DNA, 21 bp, artificial sequence
  Sense Strand siRNA 117
ugacuugccccagucaguctt

SEQ ID NO: 546 - DNA, 21 bp, artificial sequence
  Antisense Strand siRNA 117
gacugacuggggcaagucatt

SEQ ID NO: 547 - DNA, 21 bp, artificial sequence
  Target Sequence 118
aaggaagtgaccatggattgt

SEQ ID NO: 548 - DNA, 21 bp, artificial sequence
  Sense Strand siRNA 118
ggaagugaccauggauugutt

SEQ ID NO: 549 - DNA, 21 bp, artificial sequence
  Antisense Strand siRNA 118
acaauccauggucacuucctt

SEQ ID NO: 550 - DNA, 21 bp, artificial sequence
  Target Sequence 119
aagtgaccatggattgtaaaa

SEQ ID NO: 551 - DNA, 21 bp, artificial sequence
  Sense Strand siRNA 119
gugaccauggauuguaaaatt

SEQ ID NO: 552 - DNA, 21 bp, artificial sequence
  Antisense Strand siRNA 119
uuuuacaauccauggucactt

SEQ ID NO: 553 - DNA, 21 bp, artificial sequence
  Target Sequence 120
aaaaccccttccaacccaact

SEQ ID NO: 554 - DNA, 21 bp, artificial sequence
  Sense Strand siRNA 120
aaccccuuccaacccaacutt

SEQ ID NO: 555 - DNA, 21 bp, artificial sequence
  Antisense Strand siRNA 120
aguuggguuggaagggguutt

SEQ ID NO: 556 - DNA, 21 bp, artificial sequence
  Target Sequence 121
aaccccttccaacccaactgg

SEQ ID NO: 557 - DNA, 21 bp, artificial sequence
  Sense Strand siRNA 121
ccccuuccaacccaacuggtt

SEQ ID NO: 558 - DNA, 21 bp, artificial sequence
  Antisense Strand siRNA 121
ccaguuggguuggaaggggtt

SEQ ID NO: 559 - DNA, 21 bp, artificial sequence
  Target Sequence 122
aacccaactgggatggaaagg

SEQ ID NO: 560 - DNA, 21 bp, artificial sequence
  Sense Strand siRNA 122
cccaacugggauggaaaggtt

SEQ ID NO: 561 - DNA, 21 bp, artificial sequence
  Antisense Strand siRNA 122
ccuuuccaucccaguugggtt

SEQ ID NO: 562 - DNA, 21 bp, artificial sequence
  Target Sequence 123
aactgggatggaaaggagata

SEQ ID NO: 563 - DNA, 21 bp, artificial sequence
  Sense Strand siRNA 123
cugggauggaaaggagauatt

SEQ ID NO: 564 - DNA, 21 bp, artificial sequence
  Antisense Strand siRNA 123
uaucuccuuuccaucccagtt

SEQ ID NO: 565 - DNA, 21 bp, artificial sequence
  Target Sequence 124
aaaggagatacgggattcccc

SEQ ID NO: 566 - DNA, 21 bp, artificial sequence
  Sense Strand siRNA 124
aggagauacgggauucccctt

SEQ ID NO: 567 - DNA, 21 bp, artificial sequence
  Antisense Strand siRNA 124
ggggaaucccguaucuccutt

SEQ ID NO: 568 - DNA, 21 bp, artificial sequence
  Target Sequence 125
aagcgctggatatttaccaga

SEQ ID NO: 569 - DNA, 21 bp, artificial sequence
  Sense Strand siRNA 125
gcgcuggauauuuaccagatt

SEQ ID NO: 570 - DNA, 21 bp, artificial sequence
  Antisense Strand siRNA 125
ucugguaaauauccagcgctt

SEQ ID NO: 571 - DNA, 21 bp, artificial sequence
  Target Sequence 126
aattgaactcaccaaaggctc

SEQ ID NO: 572 - DNA, 21 bp, artificial sequence
  Sense Strand siRNA 126
uugaacucaccaaaggcuctt

SEQ ID NO: 573 - DNA, 21 bp, artificial sequence
  Antisense Strand siRNA 126
gagccuuuggugaguucaatt

SEQ ID NO: 574 - DNA, 21 bp, artificial sequence
  Target Sequence 127
aactcaccaaaggctccttgg

SEQ ID NO: 575 - DNA, 21 bp, artificial sequence
  Sense Strand siRNA 127
cucaccaaaggcuccuuggtt

SEQ ID NO: 576 - DNA, 21 bp, artificial sequence
  Antisense Strand siRNA 127
ccaaggagccuuuggugagtt

SEQ ID NO: 577 - DNA, 21 bp, artificial sequence
  Target Sequence 128
aaaggctccttggaaaaacga

SEQ ID NO: 578 - DNA, 21 bp, artificial sequence
  Sense Strand siRNA128
aggcuccuuggaaaaacgatt

SEQ ID NO: 579 - DNA, 21 bp, artificial sequence
  Antisense Strand siRNA 128
ucguuuuuccaaggagccutt

SEQ ID NO: 580 - DNA, 21 bp, artificial sequence
  Target Sequence 129
aaaaacgaagccagcctggac

SEQ ID NO: 581 - DNA, 21 bp, artificial sequence
  Sense Strand siRNA 129
aaacgaagccagccuggactt

SEQ ID NO: 582 - DNA, 21 bp, artificial sequence
  Antisense Strand siRNA 129
guccaggcuggcuucguuutt

SEQ ID NO: 583 - DNA, 21 bp, artificial sequence
  Target Sequence 130
aaacgaagccagcctggacca

SEQ ID NO: 584 - DNA, 21 bp, artificial sequence
  Sense Strand siRNA 130
acgaagccagccuggaccatt

SEQ ID NO: 585 - DNA, 21 bp, artificial sequence
  Antisense Strand siRNA 130
ugguccaggcuggcuucgutt
